(19) United States
(12) Patent Application Publication
(10) Pub. No.: US 2023/0111281 A1
(43) Pub. Date: Apr. 13, 2023

(54) IDENTIFICATION OF THE CELLULAR FUNCTION OF AN ACTIVE NFKB PATHWAY

(71) Applicant: InnoSign B.V., Eindhoven (NL)

(72) Inventors: Arie Rombertus VAN DOORN, ZALTBOMMEL (NL); Anja VAN DE STOLPE, VUGHT (NL)

(21) Appl. No.: 17/618,436

(22) PCT Filed: Jun. 23, 2020
(86) PCT No.: PCT/EP2020/067406

§ 371 Date: Dec. 11, 2021

(30) Foreign Application Priority Data
Jun. 24, 2019 (EP) 19181994.5

(51) Int. Cl. C12Q 1/6883

(52) U.S. Cl. CPC C12Q 1/6883; C12Q 2600/158

(57) ABSTRACT

Target genes of the NFkB cellular signaling pathway are disclosed, which are associated with a cellular function such as cell division, apoptosis or protection against oxidative stress of an active NFkB cellular signaling pathway and can be used for determining a cellular function of an active NFkB cellular signaling in a human subject.

### CROSS-REFERENCE TO PRIOR APPLICATIONS

[0001] This application is the U.S. National Phase application under 35 U.S.C. § 371 of International Application No. PCT/EP2020/067406, filed on Jun. 23, 2020, which claims the benefit of European Patent Application No. 19181994.5, filed on Jun. 24, 2019. These applications are hereby incorporated by reference herein.

### ELECTRONIC SEQUENCE LISTING

[0002] The instant application contains a Sequence Listing which has been submitted electronically in ASCII format and is hereby incorporated by reference in its entirety. Said ASCII copy, created on Jul. 1, 2022, is named SEQ_LST_ST25.txt and is 1,752,961 bytes in size.

### FIELD OF THE INVENTION

[0003] The present invention generally relates to the field of bioinformatics, genomic/transcriptomic processing, proteomic processing, and related arts. More particularly, the present invention relates to certain target genes of the NFkB cellular signaling pathway, which are associated with a cellular function of an active NFkB cellular signaling pathway and can be used for determining a cellular function of an active NFkB cellular signaling in a subject. The present invention also relates to a method for determining a cellular function of an active NFkB cellular signaling pathway in a cell sample, the method comprising determining in the cell sample containing cells with an active NFkB cellular signaling pathway the cellular function based on expression level of at least one NFkB target gene associated with the cellular function. The present invention further relates to a kit comprising components for determining the expression levels of at least one NFkB target gene associated with a cellular function. The present invention further relates to an apparatus comprising a digital processor configured to perform the method, a non-transitory storage medium storing instructions that are executable by a digital processing device to perform such a method, and a computer program comprising program code means for causing a digital processing device to perform such a method.

### BACKGROUND OF THE INVENTION

[0004] An appropriately functioning immune system is crucial for maintaining health and limiting the damage of disease. An appropriate immune response protects against disease, is relevant for the course of a disease and may be required for optimal effect of therapeutics.

[0005] The immune system is made up by a large number of immune cell types that work together in a coordinated manner to produce the right immune response to, for example, an invading pathogen or an internal disease like cancer. A distinction is made between the innate immune system which controls early inflammatory responses, and the adaptive immune response that controls long term immune responses.

[0006] The mechanistic principle behind its functioning is that the immune system generates an immune response to non-self antigens, like an infectious agent or an abnormal protein on a cancer cell. Recognition of such antigens is at the core of a functioning immune system. After an elaborate process in which non-self antigens are recognized as non-self, effector T cells are instructed to find and recognize the specific antigen and attack the invader carrying the antigen.

[0007] The right balance between overactivity and underactivity of the system is crucial for development of disease and maintenance of health and correction of the balance is an important therapeutic approach.

[0008] Both overactivity as well as inactivity can lead to disease, and multiple drugs are available and being developed to correct a defect in the immune response causing a specific disease, either to increase the activity of the immune system, like in cancer or infections, or to reduce its activity, like in auto-immune disease, or allogenic transplantations.

[0009] Predicting and monitoring which therapy is most effective is difficult, also in the case of (drug-based) therapies which specifically target a cellular mechanism underlying the abnormal functioning of the immune system.

[0010] A few example diseases in which the immune response is therapeutically modulated in order to treat the disease are cancer, kidney transplantation, rheumatoid arthritis, psoriasis and diabetes.

[0011] Especially for treatment of cancer patients using immunotherapy, a lot of progress has been made recently and many drugs have been, and are being developed for this purpose. In case of cancer, in addition to effects of changes in the genome of cancer cells, cancer growth and metastasis are influenced by the cancer cell microenvironment, mainly consisting of fibroblasts and cells of the immune system. Infiltration of cancer tissue by immune cells, both of the monocyte macrophage lineage and a variety of lymphocyte subtypes plays an important role, either in mounting an immune response (appropriately active antigen-presenting dendritic cells, cytotoxic T cells and CD4+ helper T cells) or creating immune tolerance to the cancer cells (regulatory/suppressor T cells, inhibition of activity of immune cells by production of IL10 or TGF-beta), or even promoting tumor progression. Thus, immune cell infiltration can have both tumor suppressive as well as tumor promoting effects, depending on the immune subtypes present, their functional status and the type of cancer cell.

[0012] In general, in cancer, especially in advanced cancer, the immune response has failed, either because it is not aware of cancer cells present, or it has become exhausted (“tolerant”) by continuous interaction with cancer antigens.

[0013] Immunotherapy against cancer aims at respectively enabling or restoring an effective anti-cancer immune response. In the first case when the immune system was not aware of the cancer being present, full cure of cancer may in principle be possible once an effective immune response is generated, for example by vaccination with cancer antigens, and therapy duration is limited. In contrast, in the case of an exhausted immune system cure will in general not be possible, which necessitates continuation of therapy as long as possible, in this case by interfering with the immune suppressive (inter)actions of cancer cells and various immune cells, especially CD8+ T cells, by checkpoint inhibitor drugs. A large number of immunotherapy drugs which activates the immune response in a targeted manner is in development, for example by blocking PD1-PDL1 (immune activity checkpoint) interaction and signaling.

[0014] Many other diseases, in particular (auto)immuno-mediated diseases and immunodeficiency diseases are also treated with immunomodulatory drugs. In the first case the immune response needs to be dampened; in the second case its effectiveness needs to be increased. In all cases it is important that the effect of the drug is as specific in correcting the defect as possible. Also here a large number of drugs are being developed, with often facing the same challenges as described for cancer.

[0015] In immunotherapy (for all diseases) there are a number of clinical challenges: (1) predict therapy response in the individual patient, since only a small percentage will respond; this also includes prediction of response to combination immunotherapy versus monotherapy, in case of cancer also in vivo vaccination by inducing release of antigens from the cancer cells (e.g. by radiation), and other vaccination therapies; (2) assess as soon as possible whether a therapy is effective in view of side effects and costs; (3) identify patients that are at risk of severe side-effects of immunotherapy. Neither of the challenges has been adequately addressed. For example for cancer, quantification of CD8+ and CD3/4+ cells is available as well as PD1 and PD-L1 staining to predict therapy response, however neither one is reliable. Therapy response assessment is generally possible about 3 to 6 months after initiation of therapy.

[0016] There is thus a high need for biomarker-based assays which can predict and assess/monitor therapy response to specific immunotherapy drugs or drug/therapy combinations, in case of cancer also including combinations between immunotherapy drugs and other therapies which induce release of antigens from cancer cells, like radiation, chemotherapy and targeted therapy.

[0017] Nuclear factor-kappa B (nuclear factor kappa-light-chain-enhancer of activated B cells, NFkB, NFkB or NFKB) is an inducible transcription factor that regulates the expression of many genes involved in the immune response. The NFkB pathway is a key cellular signaling pathway involved in immune, inflammatory, and acute phase response, but is also implicated in the control of cell survival, proliferation, and apoptosis. In healthy, non-activated cells, the NFkB cellular signaling pathway associated transcription factors that are composed of dimers originating from five genes (NFKB 1 or p50/p105, NFKB2 or p52/p100, RELA or p65, REL, and RELB) are predominantly cytoplasmic due to their interaction with the inhibitors of NFkB (IkBs) and therefore remain transcriptionally inactive, thus keeping the NFkB cellular signaling pathway inactive. The NFkB transcription factor can be activated by a large variety of stimuli, like reactive oxygen species, pathogens, cytokines, and by activation of T- and B-cell receptors in immune cells. Upon activation the IkBs become phosphorylated and undergo ubiquitin-dependent degradation by the proteasome, and NFkB dimers are translocated to the nucleus where they act as transcription factors. Activity of the NFkB cellular signaling pathway is known to be associated with different types of cancer and to support pro-survival phenotypes of cancer cells.

[0018] WO 2017/029215 A1 discloses a computational model for inferring activity of the NFkB pathway, based on measurement of transcription factor target gene levels. However, it remains unknown which cellular function is associated with it, if the NFKB pathway was inferred to be active. NFkB pathway can exert multiple cellular functions including cell division, cell differentiation, cell adhesion, chemotaxis and migration, apoptosis, immune functions like antigen processing, and generation of and protection against oxidative stress, which functions are determined by the cell type, and the cellular condition as determined by intracellular and extracellular signals.

[0019] It would thus be desirable to not only know whether the NFkB pathway is active or inactive but also more specifically know which cellular function is associated with an active NFKB pathway. That is, if an active NFkB pathway was detected, it would be of importance to identify the function of the NFkB pathway in that sample. For example, if the NFkB pathway was measured to be active in a cancer tissue sample, but it would have a functional state to enhance the immune response, blocking the NFkB activity would probably be contraindicated; on the other hand, if NFkB activity was associated with oxidative stress in a cancer sample which supports cancer progression, NFkB would likely provide a clinically relevant drug target in the respective patient.

[0020] The present invention is concerned with the problem of providing an enhanced diagnosis for immune-related conditions.

### SUMMARY OF THE INVENTION

[0021] The above problem is solved by a target gene or a set of target genes of the NFkB cellular signaling pathway, which is/are associated with a cellular function of an active NFkB cellular signaling pathway (herein also referred to as cellular function-associated NFkB target gene (FATG) or genes (FATGs)).

[0022] In accordance with a main aspect of the present invention is provided a method for determining a cellular function of an active NFkB cellular signaling pathway in a cell sample containing cells with an active NFkB cellular signaling pathway, the method comprising: determining the expression level of two or more genes, for example 2, 3, 4, 5, 6, or 7 genes, selected from the group 1 consisting of BCL2, BCL2L1, CCND2, SKP2, CSF1, NOX1 and SERPINE2; and determining the expression level of two genes selected from group 2 consisting of CYP27B1, IGHE/IGHG1; and determining the expression level of two or more genes, for example 2, 3, 4, 5 or 6 genes, selected from group 3 consisting of BIRC3, CCL2, GZMB, SOD2, CCL5 and MMP1, and determining the cellular function based on expression level of the selected genes of groups 1, 2 and 3. The genes of group 1 are associated with the cellular function cell division, the genes of group 2 are associated with the cellular function cell apoptosis and the genes of group 3 are associated with the cellular function protection against oxidative stress.

[0023] In a preferred embodiment of the method of the invention, the method comprises: determining the expression level of three or more genes, for example 3, 4, 5, 6, or 7 genes, selected from the group 1 consisting of BCL2, BCL2L1, CCND2, SKP2, CSF1, NOX1 and SERPINE2; and determining the expression level of two genes selected from group 2 consisting of CYP27B1, IGHE/IGHG1; and determining the expression level of three or more genes, for example 3, 4, 5 or 6 genes, selected from group 3 consisting of BIRC3, CCL2, GZMB, SOD2, CCL5 and MMP1, and determining the cellular function based on expression level the selected genes of groups 1, 2 and 3.

[0024] It is particularly preferred that the two or more or three or more genes from group 1 (e.g. 2, 3 or 4 genes) are selected from the group of genes consisting of BCL2, BCL2L1, CCND2 and SKP2, and/or that the two or more or three or more genes from group 3 (e.g. 2, 3 or 4 genes) are selected from the group of genes consisting of BIRC3, CCL2, GZMB, SOD2.

[0025] In a particularly preferred embodiment the method according to the invention comprises determining the expression level of all of the genes in group 1 and/or group 3. Therefore in a particularly preferred embodiment the method comprises determining the expression level of each of the genes in group 1 consisting of BCL2, BCL2L1, CCND2, SKP2, CSF1, NOX1 and SERPINE2; and determining the expression level of each of genes in group 2 consisting of CYP27B1, IGHE/IGHG1; and determining the expression level of each of the genes in group 3 consisting of BIRC3, CCL2, GZMB, SOD2, CCL5 and MMP1.

[0026] The present invention is based on the realization that specific NFkB target genes are differentially expressed between cells in which different cellular functions are exerted by an active NFkB cellular signaling. These FATGs can thus be used for determining a cellular function of an active NFkB cellular signaling in a subject. Particularly it was found that groups of specific genes are associated with distinct functions in cells with an active NFkB cellular signaling pathway. The inventors found that the genes BCL2, BCL2L1, CCND2, SKP2, CSF1, NOX1 and SERPINE2 (group 1) are differentially expressed when the NFkB activity is associated with cell division. Of these genes, BCL2, BCL2L1, CCND2 and SKP2 were particularly informative for this cellular function, therefore the two or more genes (e.g. 2, 3, 4, 5, 6 or 7 genes) selected from group 1 preferably comprise 1, 2, 3 or 4 genes selected from BCL2, BCL2L1, CCND2 and SKP2. It was further found that the genes CYP27B1 and IGHE/IGHG1 (group 2) are differentially expressed when the NFkB activity is associated with cell apoptosis. The probe set used by the inventors was not able to distinguish between IGHE/IGHG1, therefore it is postulated that either IGHE expression or IGHG1 expression can be used for the purpose of the invention. Therefore when referring to “IGHE/IGHG1” in the context of the invention, referred is to expression levels of IGHE, or IGHG1, or both. It was further found that the genes BIRC3, CCL2, GZMB, SOD2, CCL5 and MMP1 (group 3) are differentially expressed when the NFkB activity is associated with protection against oxidative stress. Of these genes, BIRC3, CCL2, GZMB and SOD2 were particularly informative for this cellular function, therefore the two or more genes (e.g. 2, 3, 4, 5 or 6 genes) selected from group 3 preferably comprise 1, 2, 3 or 4 genes selected from BIRC3, CCL2, GZMB and SOD2.

[0027] Therefore, a cellular function (e.g. cell division) can be assigned to an active NFkB cellular signaling pathway in a cell by determining the expression levels of 2 or more, preferably 3 or more genes of the group associated with said cellular function (e.g. group 1). This can be done for a single cellular function, meaning that for a cell with an active NGkB cellular signaling pathway, NFkB is driving said cellular function. This can be done by determining two or more expression levels of the associated group and comparing these expression levels with a reference, e.g. the expression levels as determined in a cell where said function is not active or where NFkB cellular signaling is not active. In such case the cellular function as assumed to be active (and driven by NFkB signaling) when the determined expression levels of the group associated with the cellular function deviate from the reference with a predetermined threshold. When determining the expression levels of two or more genes from more than one group, e.g. all three groups, the deviations of the expression levels from each group compared to the reference can further be compared among each other, where the cellular function associated with the group displaying the strongest deviation (increased or decreased) in expression levels is assumed to be active.

[0028] The term “target gene”, as used herein, means a gene whose transcription is directly or indirectly controlled by a respective transcription factor element. The “target gene” may be a “direct target gene” and/or an “indirect target gene”. An NFkB target gene is in particular a gene associated with the NFKB cellular signaling pathway and differentially expressed between an NFKB cellular signaling pathway exerting the respective function and an NFKB cellular signaling pathway not exerting the respective function. An NFkB target gene is understood herein to be associated with a cellular function of an active NFkB cellular signaling pathway if it is differentially expressed between cells with the respective cellular function being active and cells with the cellular function being inactive. While already one FATG may be indicative for a particular cellular function, the present invention envisages the use of more than one FATG, e.g. 2, 3, 4, 5, 6, 7, 8, 9, 10, 11, 12, 13 or even 14 FATGs. The expression level may be based on the amount of transcribed RNA or protein content, preferably the amount of RNA, in particular mRNA.

[0029] The phrase “expression level of a target gene” denotes a value that is representative of the amount, e.g. a concentration, of a target gene present in a sample. This value may be based on the amount of a transcription product of the target gene (e.g. mRNA) or a translation product thereof (e.g. protein). Preferably, the expression level is based on the amount of mRNA formed from the target gene. In order to determine the expression level, techniques such as qPCR, multiple qPCR, multiplexed qPCR, ddPCR, RNAseq, RNA expression array or mass spectrometry may be used. For example, a gene expression microarray, e.g. Affymetrix microarray, or RNA sequencing methods, like an Illumina sequencer, can be used.

[0030] Activity of the NFkB pathway may be determined in accordance with the method described in WO 2017/029215 A1, which is incorporated herein by reference in its entirety, in particular for the purpose of determining whether the NFkB cellular signaling pathway is active and/or inferring (e.g. quantifying) the activity of the NFkB cellular signaling pathway. Particular reference is made to the target genes and corresponding sequence listings described therein. For the purposes of the present invention, an NFkB cellular signaling pathway is considered to be active if IkBs are determined to be phosphorylated, and/or IkBs are determined to be absent (e.g. degraded), and/or NFkB dimers are determined to be present in the nucleus and/or NFkB dimers are determined to be absent in the cytoplasm and/or the activity of the NFkB pathway, as determined by pathway analysis as described herein and/or in WO 2017/029215 A1, is determined to be active based on the NFkB pathway activity score. This score, as described in WO 2017/029215 A1 indicates a level of pathway activity, in principle without a certain defined threshold between active and inactive. The higher the pathway activity score, the more active the NFkB pathway is in a certain measured sample. This measured level of activity can have various functions, which can be defined by the here described method. By combining activity with the function determination it is possible to obtain information how strong cells exert a respective NFkB function.

[0031] Following differential expression studies between cells having a known cellular function and corresponding cells, whose respective cellular function is known to be inactive and/or whose NFkB signaling pathway is substantially inactive, as described above, additional FATGs may be identified. In particular, it is conceivable that following collection of immune cell data in the future, using this method, the list of suitable FATGs can be enhanced based on data analysis as described herein, and target gene combinations selected that further improve the function of the here described NFkB pathway-associated cellular function analysis.

[0032] The term “cellular function” is interchangeably used herein with the terms functional status and functional state, and describes a phenotype (function) that is at least partially linked to differential expression of the at least one NFkB target gene associated with the cellular function.

[0033] According to a preferred embodiment, the cellular function is selected from the group consisting of cell division, cell differentiation, cell adhesion, chemotaxis and migration, apoptosis, immune functions like antigen presentation, oxidative stress and oxidative stress protection. In particular, the cellular function is selected from the group consisting of cell division, apoptosis and oxidative stress protection. Target genes associated with cell division are preferably selected from the group consisting of BCL2, BCL2L1, CCND2, SKP2, CSF1, NOX1 and SERPINE2, and in particular selected from the group consisting of BCL2, BCL2L1, CCND2 and SKP2. Target genes associated with cell apoptosis are preferably selected from the group consisting of CYP27B1, IGHE and IGHG1. Target genes associated with protection against oxidative stress are preferably selected from the group consisting of BIRC3, CCL2, GZMB, SOD2, CCL5 and MMP1, and in particular selected from the group consisting of BIRC3, CCL2, GZMB and SOD2. More specifically, cell division is associated with decreased BCL2L1 expression, decreased NOX1 expression, increased SERPINE2 expression, increased BCL2 expression, increased CSF2 expression, increased CCND2 expression, and/or decreased SKP2 expression, as determined by differential expression analysis. Apoptosis is associated with increased CYP27B1 expression, increased IGHG1 expression and/or increased IGHE expression, as determined by differential expression analysis. Protection against oxidative stress is associated with increase BIRC3 expression, increased CCL2 expression, increased CCL5 expression, increased SOD2 expression, increased GZMB expression and increased MMP1 expression, as determined by differential expression analysis. An altered (e.g. increased) expression as determined by differential expression analysis as referred to herein means a change (e.g. increase) of an expression level of a FATG in a cell, whose respective cellular function is active (e.g. active cell division), as compared to an expression level of the FATG in a corresponding “non-activated” cell (e.g. inactive cell division).

[0034] Therefore, according to a preferred embodiment the cellular function is determined by comparing the expression levels of the selected genes of each group, wherein the cellular function is determined by differential expression analysis of the expression levels of the selected genes of groups 1, 2 and 3, wherein the cellular function is determined to be cell division if the genes selected from group 1 are differentially expressed, wherein the cellular function is determined to be apoptosis if the genes selected from group 2 are differentially expressed, and wherein the cellular function is determined to be protection against oxidative stress if the genes selected from group 3 are differentially expressed. When used herein “differentially expressed” indicates that at least one, preferably two or more genes within a group associated with a particular cellular function have increased or decreased expression as indicated above associated with activation of the cellular function. For example, when the expression levels of BCL2, BCL2L1 and NOX1 (all belonging to group 1, cell division) are determined and compared to a non-activated cell (having no active NFkB signaling or having an active NFkB pathway but being a non dividing cell) and BCL2 has increased expression, BCL2L1 has decreased expression and NOX1 has similar expression the cellular function of the active NFkB pathway is assumed to be cell division based on the differential expression of the group 1 genes (BCL2 and BCL2L1).

[0035] According to a preferred embodiment, the cellular function is determined based on evaluating a mathematical model, in particular a calibrated mathematical model, relating the expression level of the selected NFkB target genes (FATGs) from one each group (group 1, 2 and 3) to the cellular function. Input to this model can be the expression level in a form provided by gene array analysis (a.u., log ratio, and the like), which are optionally normalized and/or corrected. Accordingly, it is an embodiment of the present invention that the expression levels of the selected NFkB target genes from each group can be also an expression level normalized by and/or corrected for one or more of the following: (i) activity of the NFkB cellular signaling pathway in the cell sample; (ii) baseline expression level of the respective NFkB target genes; and/or (iii) average expression levels of the respective NFkB target genes in a group of samples comprising cells with an active NFkB pathway. The baseline expression level is also referred to herein as reference expression level and denotes an expression level of the FATG in a cell, whose respective cellular function is inactive and/or whose NFkB signaling pathway is substantially inactive.

[0036] To increase reliability, expression levels of two or more FATGs may be determined for each cellular function and/or be input for the model. In such case, a function-associated expression average (herein also denoted as EA or FATG EA) may be calculated for each cellular function based on the expression levels of the two or more target genes associated with the respective cellular function. Moreover, the function-associated expression average may be based on normalized and/or corrected expression levels (as defined above). This means, for example, that the function-associated expression average may be based on averaged normalized expression levels (as determinable by differential expression analysis) of target genes associated with a particular cellular function, wherein the normalized expression level is defined by a ratio of the expression level of the FATG to the respective reference expression level.

[0037] Further, FATGs may be weighted according to their relevance; very informative FATGs may receive more weight than less informative FATGs. Specifically, BCL2, BCL2L1, CCND2 and SKP2 have been found to be more informative for indicating active cell division and may thus receive more weight than CSF1, NOX1 and SERPINE2. BIRC3, CCL2, GZMB and SOD2 have been found to be more informative for indicating protection against oxidative stress and may thus receive more weight than CCL5 and MMP1.

[0038] The determining of the cellular function may involve discriminating between the (i.e. a first) cellular function and at least one further (i.e. a second, etc.) cellular function based on expression levels of target genes associated with the respective cellular functions. For example, for each of two or more cellular functions, expression level of at least two FATGs are determined. The expression levels may be normalized and/or corrected expression levels (as defined above). Further, two or more FATGs are preferably tested and the resulting EA determined (as described above) for each cellular function. As a result of the discrimination the method (in particular the model) may identify the predominant cellular function in the analyzed cell sample. Moreover, the method (model) may provide a ranking. The ranking may indicate which of the evaluated cellular functions is the most predominant and/or is the least predominant and/or is likely to be active and/or is likely to be the most active and/or is likely to be the least active and/or is likely to be inactive and/or the like.

[0039] According to a preferred embodiment, the cell sample is derived from a tissue, cells, blood and/or a body fluid such as a bronchial aspirate, bone marrow aspirate or a sample drawn from a body cavity of a subject, a cell line, a cell culture or a tissue culture. The cell sample may be a sample derived from a subject. The cell sample may be a sample derived from the subject and cultivated in vitro in the lab (e.g., for regenerative medicine purposes). The sample can be, e.g., a sample obtained from a cancer lesion, or from a lesion suspected for cancer, or from a metastatic tumor, or from a body cavity in which fluid is present which is contaminated with cancer cells (e.g., pleural or abdominal cavity or bladder cavity), or from other body fluids containing cancer cells, and so forth, preferably via a biopsy procedure or other sample extraction procedure. The cells of which a sample is extracted may also be tumorous cells from hematologic malignancies (such as leukemia or lymphoma). In some cases, the cell sample may also be circulating tumor cells, that is, tumor cells that have entered the bloodstream and may be extracted using suitable isolation techniques, e.g., apheresis or conventional venous blood withdrawal. Aside from blood, the body fluid of which a sample is extracted may be urine, gastrointestinal contents, or an extravasate. The term “cell sample”, as used herein, also encompasses the case where tissue and/or cells and/or body fluid of the subject have been taken from the subject and, e.g., have been put on a microscope slide, and where for performing the claimed method a portion of this sample is extracted, e.g., by means of Laser Capture Microdissection (LCM), or by scraping off the cells of interest from the slide, or by fluorescence-activated cell sorting techniques. The cells or tissue can also be from normal, non-malignant tissue, or from diseased tissue other than cancer.

[0040] The term “subject”, as used herein, refers to any living being. In some embodiments, the subject is an animal, preferably a mammal. In certain embodiments, the subject is a human being, preferably a medical subject, in particular a diseased subject such as a subject having an immune-related condition and/or cancer, or a subject having a risk of developing, or assumed to have, an immune-related condition and/or cancer. Alternatively, the cell sample may be a sample derived from a healthy subject.

[0041] According to a preferred embodiment, the cells contained in the cell sample are selected from the group consisting of immune cells and cancer cells.

[0042] As described above, an active NFkB cellular signaling pathway is determinable by pathway analysis as described elsewhere. Pathway analysis enables quantitative measurement of signal transduction pathway activity in epithelial cells, based on inferring activity of a signal transduction pathway from measurements of mRNA levels of the well-validated direct target genes of the transcription factor associated with the respective signaling pathway (see for example W Verhaegh, et al., Selection of personalized patient therapy through the use of knowledge-based computational models that identify tumor-driving signal transduction pathways. Cancer research 2014; 74(11):2936-45; W Verhaegh, A van de Stolpe. Knowledge-based computational models. Oncotarget 2014; 5(14):5196).

[0043] In accordance with pathway analysis, the activity of the NFkB cellular signaling pathway in the cells of the cell sample to be selected is inferred or inferable by a method comprising: receiving expression levels of one or more and preferably six or more target genes of the NFkB cellular signaling pathway, determining an level of an NFkB transcription factor (TF) element, the NFkB TF element controlling transcription of the one or more and preferably six or more target genes of the NFkB cellular signaling pathway, the determining being based at least in part on evaluating a mathematical model relating expression levels of the one or more and preferably six or more target genes of the NFkB cellular signaling pathway to the level of the NFkB TF element, wherein the one or more and preferably six or more target genes are selected from the group consisting of: BCL2L1, BIRC3, CCL2, CCL3, CCL4, CCL5, CCL20, CCL22, CX3CL1, CXCL1, CXCL2, CXCL3, ICAM1, IL1B, IL6, IL8, IRF1, MMP9, NFKB2, NFKBIA, NFKBIE, PTGS2, SELE, STAT5A, TNF, TNFAIP2, TNIP 1, TRAF 1 and VCAM 1; inferring the activity of the NFkB cellular signaling pathway based on the determined level of the NFkB TF element in the sample, wherein the inferring is performed by a digital processing device using the mathematical model.

[0044] With respect to explanations and/or definitions of terms, particular embodiments including specific models, further target genes and/or preferred combinations of target genes as well as the respective sequence information, reference is made to WO 2017/029215 A1, which is incorporated herein by reference in its entirety and in particular in respect of the aforementioned details.

[0045] In accordance with a preferred embodiment of the invention, the method further comprises comprising one or more of the following: monitoring the at least one cellular function of the active NFkB cellular signaling pathway; monitoring an effect of a therapy, preferably an immunotherapy, on the at least one cellular function of the active NFkB pathway; identifying a mechanism of a drug targeting the NFkB cellular signaling pathway; predicting or monitoring response to a drug targeting the NFkB cellular signaling pathway; and/or predicting whether immune cells exert a tumor suppressive or a tumor promoting effect; predicting therapy response, in particular response to immunotherapy; predicting response to a combination immunotherapy as compared to monotherapy, predicting whether a therapy, in particular an immunotherapy, is effective in view of side effects and/or costs; and/or identifying patients that are at risk of severe side-effects.

[0046] In accordance with another disclosed aspect, an apparatus comprises a digital processor configured to perform a method according to the present invention as described herein.

[0047] In accordance with another disclosed aspect, a non-transitory storage medium stores instructions that are executable by a digital processing device to perform a method according to the present invention as described herein. The non-transitory storage medium may be a computer-readable storage medium, such as a hard drive or other magnetic storage medium, an optical disk or other optical storage medium, a random access memory (RAM), read only memory (ROM), flash memory, or other electronic storage medium, a network server, or so forth. The digital processing device may be a handheld device (e.g., a personal data assistant or smartphone), a notebook computer, a desktop computer, a tablet computer or device, a remote network server, or so forth.

[0048] In accordance with another disclosed aspect, a computer program comprises program code means for causing a digital processing device to perform a method according to the present invention as described herein, when the computer program is run on the digital processing device. The digital processing device may be a handheld device (e.g., a personal data assistant or smartphone), a notebook computer, a desktop computer, a tablet computer or device, a remote network server, or so forth.

[0049] In a further aspect the invention relates to a kit comprising: components for determining the expression levels of: two or more genes selected (e.g. two, three, four five six or seven genes) from the group consisting of BCL2, BCL2L1, CCND2, SKP2, CSF1, NOX1 and SERPINE2, preferably two, three or four genes selected from the group consisting of BCL2, BCL2L1, CCND2 and SKP2; and two genes selected from group consisting of CYP27B1, IGHE/IGHG1; and two or more genes (e.g. two, three four, five or six genes) selected from group consisting of BIRC3, CCL2, GZMB, SOD2, CCL5 and MMP1, preferably two, three or four genes selected from the group consisting of BIRC3, CCL2, GZMB and SOD2, wherein the components for determining the expression levels are polymerase chain reaction primers directed to the selected genes and probes directed to the selected genes. Optionally the kit may comprise one or more of the following: polymerase chain reaction primers and probes directed to six or more NFkB target genes (e.g. 6, 7, 8, 9, 10, 11, 12 or 13 genes) selected from the group consisting of: BCL2L1, BIRC3, CCL2, CCL3, CCL4, CCL5, CCL20, CCL22, CX3CL1, CXCL1, CXCL2, CXCL3, ICAM1, IL1B, IL6, IL8, IRF1, MMP9, NFKB2, NFKBIA, NFKBIE, PTGS2, SELE, STAT5A, TNF, TNFAIP2, TNIP1, TRAF1, and VCAM1, preferably wherein said six or more target genes (e.g. 6, 7, 8, 9, 10, 11, 12 or 13 genes) are selected from the group consisting of CXCL2, ICAM1, IL6, CCL5, NFKBIA, IL8, TNFAIP2, CXCL3, MMP9, NFKB2, CCL20, CCL2, and CXCL1, more preferably wherein said six or more target genes (e.g. 6 or 7 genes) are selected from the group consisting of CXCL2, ICAM1, IL6, CCL5, NFKBIA, IL8, and TNFAIP2, and/or the apparatus according to the invention and described herein, and/or the non-transitory storage medium cording to the invention and described herein, and/or the computer program cording to the invention and described herein.

[0050] In a further aspect the invention relates to a method for diagnosing a mammal using a kit, the diagnosis being based on determining at least one cellular function of an active NFkB cellular signaling pathway in the mammal, the kit comprising: components for determining the expression levels of: two or more genes selected (e.g. two, three, four five six or seven genes) from the group consisting of CL2, BCL2L1, CCND2, SKP2, CSF1, NOX1 and SERPINE2, preferably two, three or four genes selected from the group consisting of BCL2, BCL2L1, CCND2 and SKP2; and two genes selected from group consisting of CYP27B1, IGHE/IGHG1; and two or more genes (e.g. two, three four, five or six genes) selected from group consisting of BIRC3, CCL2, GZMB, SOD2, CCL5 and MMP1, preferably two, three or four genes selected from the group consisting of BIRC3, CCL2, GZMB and SOD2, wherein the components for determining the expression levels are polymerase chain reaction primers directed to the selected genes and probes directed to the selected genes. Optionally the kit may comprise one or more of the following: polymerase chain reaction primers and probes directed to six or more NFkB target genes (e.g. 6, 7, 8, 9, 10, 11, 12 or 13 genes) selected from the group consisting of: BCL2L 1, BIRC3, CCL2, CCL3, CCL4, CCL5, CCL20, CCL22, CX3CL1, CXCL1, CXCL2, CXCL3, ICAM1, IL1B, IL6, IL8, IRF1, MMP9, NFKB2, NFKBIA, NFKBIE, PTGS2, SELE, STAT5A, TNF, TNFAIP2, TNIP1, TRAF1, and VCAM1, preferably wherein said six or more target genes (e.g. 6, 7, 8, 9, 10, 11, 12 or 13 genes) are selected from the group consisting of CXCL2, ICAM1, IL6, CCL5, NFKBIA, IL8, TNFAIP2, CXCL3, MMP9, NFKB2, CCL20, CCL2, and CXCL1, more preferably wherein said six or more target genes (e.g. 6 or 7 genes) are selected from the group consisting of CXCL2, ICAM1, IL6, CCL5, NFKBIA, IL8, and TNFAIP2, and/or the apparatus according to the invention and described herein, and/or the non-transitory storage medium cording to the invention and described herein, and/or the computer program cording to the invention and described herein.

[0051] In accordance with another disclosed aspect, a kit for determining at least one cellular function of an active NFkB cellular signaling pathway comprises components for determining the expression levels of at least one NFkB target gene associated with a cellular function. The kit may be used in a method of diagnosis of a mammal, the diagnosis being based on determining at least one cellular function of an active NFkB cellular signaling pathway in the mammal. Optionally, the kit further comprises the herein disclosed apparatus, the herein disclosed non-transitory storage medium, or the herein disclosed computer program. Preferably, the kit comprises components for determining expression levels of one, a combination of two or more, or all of the following FATGs: BCL2L1, BCL2, CCND2, SKP2, NOX1, SERPINE2, CSF2, CYP27B1, IGHG1, IGHE, BIRC3, CCL2, SOD2, GZMB, CCL5 and MMP1. More preferably, the kit comprises components for determining expression levels of one, a combination of two or more, or all of the following FATGs: BCL2L1, BCL2, CCND2, SKP2, CYP27B1, IGHG1, IGHE, BIRC3, CCL2, SOD2 and GZMB. A combination of FATGs as used herein refers to any permutation of 2, 3, 4, 5, 6, 7, 8, 9, 10, etc. FATGs. The kit may comprises one or more components or means for measuring (in particular quantifying) the expression levels of the target genes selected from the group consisting of: a DNA array chip, an oligonucleotide array chip, a protein array chip, an antibody, a plurality of probes, for example, labeled probes, a set of RNA reverse-transcriptase sequencing components, and/or RNA or DNA, including cDNA, amplification primers. In a preferred embodiment, the kit is selected from the group consisting of qPCR, multiple qPCR, multiplexed qPCR, ddPCR, RNAseq, RNA expression array and mass spectrometry. In an embodiment, the kit includes a set of labeled probes directed to a portion of an mRNA or cDNA sequence of the target genes as described herein. In an embodiment, the kit includes a set of primers and probes directed to a portion of an mRNA or cDNA sequence of the target genes. In an embodiment, the labeled probes are contained in a standardized 96-well plate. In an embodiment, the kit further includes primers or probes directed to a set of reference genes. Such reference genes can be, for example, constitutively expressed genes useful in normalizing or standardizing expression levels of the target gene expression levels described herein.

[0052] In some embodiments, the kit is not a whole genome microarray. For example, the kit may at most be suited to determine expression levels of less than 1,000,000, less than 100,000 or less than 10,000 of target genes. For example, the kit of the present invention may include components for determining expression levels of not more than 1000 target genes, not more than 700 target genes, not more than 500 target genes, not more than 200 target genes, not more than 100 target genes, in addition to the components required for the specific target genes disclosed herein.

[0053] Another aspect of the present invention is a method of diagnosis or prognosis of a mammal, the diagnosis being based on determining at least one cellular function of an active NFkB cellular signaling pathway in the mammal.

[0054] Further advantages will be apparent to those of ordinary skill in the art upon reading and understanding the attached FIGURES, the following description and, in particular, upon reading the detailed examples provided herein below.

[0055] In an alternative embodiment, the invention relates to a method for determining a cellular function of an active NFkB cellular signaling pathway in a cell sample. The method comprises the step of determining in the cell sample containing cells with an active NFkB cellular signaling pathway the cellular function based on expression level of at least one NFkB target gene associated with the cellular function.

[0056] In a preferred embodiment of the invention, the at least one NFkB target gene is selected from the group consisting of BCL2L1, BCL2, CCND2, SKP2, NOX1, SERPINE2, CSF2, CYP27B1, IGHG1, IGHE, BIRC3, CCL2, SOD2, GZMB, CCL5 and MMP1, and wherein the at least one NFkB target gene is preferably selected from the group consisting of BCL2L1, BCL2, CCND2, SKP2, CYP27B1, IGHG1, IGHE, BIRC3, CCL2, SOD2 and GZMB.

[0057] In a preferred embodiment of the invention, the cellular function is selected from the group consisting of cell division, cell differentiation, cell adhesion, chemotaxis and migration, apoptosis, immune functions like antigen presentation, oxidative stress and oxidative stress protection, and wherein the cellular function is preferably selected from the group consisting of cell division, apoptosis and oxidative stress protection.

[0058] In a preferred embodiment of the invention the at least one NFkB target gene is selectable based on differential expression studies comparing an expression level of the at least one cellular function-associated NFkB target gene of an active NFkB cellular signaling pathway, whose respective cellular function is active, with an expression level of the at least one cellular function-associated NFkB target gene of an active NFkB cellular signaling pathway, whose respective cellular function is inactive. In a preferred embodiment of the invention the cellular function is determined based on evaluating a mathematical model relating the expression level of the at least one NFkB target gene to the cellular function.

[0059] In a preferred embodiment of the invention the expression level of the at least one NFkB target gene is an expression level normalized by and/or corrected for one or more of the following: activity of the NFkB cellular signaling pathway in the cell sample; baseline expression level of the respective NFkB target gene(s); and/or average expression levels of the respective NFkB target gene(s) in a group of samples comprising cells with an active NFkB pathway.

[0060] In a preferred embodiment of the invention the determining of the cellular function involves discriminating between the cellular function and at least one further cellular function based on expression levels of target genes associated with the respective cellular functions.

[0061] In a preferred embodiment of the invention the cell sample is derived from a tissue, cells, blood, a body fluid, a cell line, a cell culture and/or a tissue culture.

[0062] In a preferred embodiment of the invention the cells contained in the cell sample are selected from the group consisting of immune cells and cancer cells and/or wherein the cells are obtained from a subject having, or suspected of having, or having a predisposition of acquiring, an immune-related condition such as kidney transplantation, rheumatoid arthritis, psoriasis, diabetes and preferably cancer.

[0063] In a preferred embodiment of the invention the cell sample containing cells with an active NFkB cellular signaling pathway is selected based on activity of the NFkB cellular signaling pathway in the cells contained in the cell sample, wherein the activity of the NFkB cellular signaling pathway in the cells is inferred or inferable by a method comprising: receiving expression levels of one or more and preferably six or more target genes of the NFkB cellular signaling pathway, determining an level of an NFkB transcription factor (TF) element, the NFkB TF element controlling transcription of the one or more and preferably six or more target genes of the NFkB cellular signaling pathway, the determining being based at least in part on evaluating a mathematical model relating expression levels of the one or more and preferably six or more target genes of the NFkB cellular signaling pathway to the level of the NFkB TF element, wherein the one or more and preferably six or more target genes are selected from the group consisting of: BCL2L1, BIRC3, CCL2, CCL3, CCL4, CCL5, CCL20, CCL22, CX3CL1, CXCL1, CXCL2, CXCL3, ICAM1, IL1B, IL6, IL8, IRF1, MMP9, NFKB2, NFKBIA, NFKBIE, PTGS2, SELE, STAT5A, TNF, TNFAIP2, TNIP 1, TRAF 1 and VCAM 1; inferring the activity of the NFkB cellular signaling pathway based on the determined level of the NFkB TF element in the sample, wherein the inferring is performed by a digital processing device using the mathematical model.

[0064] In a preferred embodiment of the invention the method further comprises one or more of the following: monitoring the at least one cellular function of the active NFkB cellular signaling pathway; monitoring an effect of a therapy, preferably an immunotherapy, on the at least one cellular function of the active NFkB pathway; identifying a mechanism of a drug targeting the NFkB cellular signaling pathway; predicting or monitoring response to a drug targeting the NFkB cellular signaling pathway; and/or predicting whether immune cells exert a tumor suppressive or a tumor promoting effect; predicting therapy response, in particular response to immunotherapy; predicting response to a combination immunotherapy as compared to monotherapy, predicting whether a therapy, in particular an immunotherapy, is effective in view of side effects and/or costs; and/or identifying patients that are at risk of severe side-effects.

[0065] In a further aspect the invention relates to an apparatus for determining at least one cellular function of an active NFkB cellular signaling pathway comprising at least one digital processor configured to perform the method according to the invention.

[0066] In a further aspect the invention relates to a non transitory storage medium for determining at least one cellular function of an active NFkB cellular signaling pathway storing instructions that are executable by a digital processing device to perform the method of the invention.

[0067] In a further aspect the invention relates to a computer program for determining at least one cellular function of an active NFkB cellular signaling pathway comprising program code means for causing a digital processing device to perform a method of the invention, when the computer program is run on the digital processing device.

[0068] In a further aspect the invention relates to a kit for use in a method of diagnosis of a mammal, the diagnosis being based on determining at least one cellular function of an active NFkB cellular signaling pathway in the mammal, the kit comprising: components for determining the expression levels of at least one NFkB target gene associated with a cellular function, and optionally the apparatus of the invention, the non-transitory storage medium of the invention, or the computer program of the invention.

[0069] This application describes several preferred embodiments. Modifications and alterations may occur to others upon reading and understanding the preceding detailed description. It is intended that the application is construed as including all such modifications and alterations insofar as they come within the scope of the appended claims or the equivalents thereof.

[0070] Other variations to the disclosed embodiments can be understood and effected by those skilled in the art in practicing the claimed invention, from a study of the drawings, the disclosure, and the appended claims.

[0071] It shall be understood that the herein disclosed methods, the herein disclosed apparatus, the herein disclosed non-transitory storage medium, the herein disclosed computer program, and the herein disclosed kits have similar and/or identical preferred embodiments, in particular, as defined in the dependent claims.

[0072] In the claims, the word “comprising” does not exclude other elements or steps, and the indefinite article “a” or “an” does not exclude a plurality.

[0073] A single unit or device may fulfill the functions of several items recited in the claims. The mere fact that certain measures are recited in mutually different dependent claims does not indicate that a combination of these measures cannot be used to advantage. Calculations performed by one or several units or devices can be performed by any other number of units or devices.

[0074] It shall be understood that a preferred embodiment of the present invention can also be any combination of the dependent claims or above embodiments with the respective independent claim.

[0075] These and other aspects of the invention will be apparent from and elucidated with reference to the embodiments described hereinafter.

### BRIEF DESCRIPTION OF THE DRAWINGS

[0076] In the following drawings:

[0077] FIG. 1 schematically shows a CDS system, which provides clinical decision support based on the determined cellular function of an active NFkB cellular signaling pathway in a cell sample, as disclosed herein.

### DETAILED DESCRIPTION OF EMBODIMENTS

[0078] The following embodiments merely illustrate particularly preferred methods and selected aspects in connection therewith. The teaching provided therein may be used for constructing several tests and/or kits. The following examples are not to be construed as limiting the scope of the present invention.

[0079] The present invention relates to means and methods that can identify a cellular function of an active NFkB cellular signaling pathway. Knowing the cellular function may assist in selection of a therapy, in particular cancer therapy. The present invention focuses on the NFkB (herein also referred to as NFkB) pathway. The NFkB pathway is one of the most important signal transduction pathways in the immune response, and also plays important roles in other cells, notably cancer cells.

[0080] The present invention for the first time facilitates identification of the (predominant) cellular function of an active NFkB signaling pathway. Activity of an NFkB signaling pathway can be determined by a computational model based on measurement of the transcription factor target gene levels, where target genes were carefully selected from the existing literature as described in WO 2017/029215 A1, which is incorporated herein by reference in its entirety. As described in the introduction, activity of the NFkB pathway does however not provide information about the functional role, which the NFkB pathway exerts in a cell. The present inventors found that certain NFkB target genes are differentially expressed between different cellular function of an active NFkB pathway. These target genes are denoted as cellular function-associated NFkB target genes (FATGs).

### Identification of Cellular Function-Associated NFkB Target Genes (FATGs)

[0081] The NFkB pathway regulates multiple cellular functions. A method is described by which important cellular functions can be determined of an active NFkB pathway: cell division, apoptosis and oxidative stress.

[0082] Affymetrix U133Plus2.0 mRNA expression microarray datasets from the GEO database (https://www.ncbi.nlm.nih.gov/gds/) were used to identify NFkB active samples that were associated with a “ground truth” NFkB cellular function. Unless otherwise indicated, expression levels are given in the following as differential expression levels (log odd) gathered from the corresponding raw data received from the Affymetrix microarray datasets.

[0083] For each NFkB activity-associated cellular function one prototypic dataset was defined which was used to discover cellular function-associated NFkB target genes (cf. Table 1).

TABLE 1
Definition of a prototypic dataset for each NFkB
functional state. The prototypic dataset was used as target
gene discovery and calibration dataset.

| | Comparison (active vs. inactive | Calibration |
|---|---|---|
| Cellular Function | cellular function) | dataset |
| Cell division | PBMC: 24 hr vs Ohr after IL2 | GSE7345 |
| | withdrawal | GSE8059 |
| | NK: 24 hr vs Ohr IL2 stimulation | |
| Cell Apoptosis | MM1.S cells: beta-catenin | GSE17385 |
| | knockdown vs control | |
| Protection against | Basal breast cancer with SOD above | GSE45827 |
| oxidative stress | threshold vs normal | |

[0084] Next to these calibration ‘discovery’ datasets, independent Affymetrix validation datasets were also selected, also containing a ground truth per sample-data, and these were used to validate the cellular function-associated NFkB target genes (FATG). Subsequently for each sample in the datasets NFkB pathway activity analysis (NFkB activity in the sample data was measured in a quantitative manner using the previously described NFkB computational model in WO 2017/029215 A1) was performed and the functional status of each analyzed cell sample was listed according to the ‘ground truth’ provided by the authors of the corresponding publication or the annotation provided in GEO.

[0085] Subsequently, to discover FATGs for each cellular function of NFkB, in the discovery datasets (cf. Table 1), NFkB active samples with an annotated “ground truth” with respect to the NFkB cellular function, individual NFkB target gene (comprising the target genes of the activity model plus extended list of target genes) expression levels were compared between sample groups with the different designated functions, to discover NFkB target genes that were associated with one of the mentioned functions.

[0086] As NFkB target genes to investigate with respect to differential expression in the comparison between function-associated datasets, the original set of target genes as disclosed in WO 2017/029215 A1 was used complemented with additional target genes of which sufficient literature evidence was available to provide evidence that the target gene was a direct NFkB target gene:

[0087] A. Target genes used in original pathway activity model (WO 2017/029215A1): BCL2L1, BIRC3, CCL2, CCL3, CCL4, CCL5, CCL20, CCL22, CX3CL1, CXCL1, CXCL2, CXCL3, ICAM1, IL1B, IL6, IL8, IRF1, MMP9, NFKB2, NFKBIA, NFKBIE, PTGS2, SELE, STAT5A, TNF, TNFAIP2, TNIP1, TRAF1 and VCAM1

[0088] B. Additionally selected NFKB target genes from literature: ABCA1, ABCB4, ABCC6, ABCG8, ADH1A, ADORA1, ADORA2A, AFP, AGER, AGT, ALOX12, APOBEC2, APOC3, APOD, APOE, AQP4, AR, ARFRP1, ASPH, ASS1, ATP1A2, B2M, BACE1, BAX, BCL2, BCL2L11, BCL3, BDKRB1, BDNF, BLNK, BMP2, BMP4, BNIP3, BRCA2, BTK, C4BPA, C69, CASP4, CCL1, CCL19, CCL23, CCND1, CCND2, CCR5, CCR7, CD209, CD274, CD38, CD3G, CD40, CD40LG, CD44, CD48, CD80, CD83, CD86, CDX1, CEBPD, CFB, CHI3L1, CIDEA, COL1A2, CR2, CREB3, CRP, CSF2, CSF3, CTSB, CXCL5, CXCL9, CYP19A1, CYP27B1, CYP7B1, DIO2, DNASE1L2, EBB, EDN1, EGFR, ELF3, ENG, EPHA1, EPO, ERBB2, F3, F8, FABP6, FAM148A, FAS, FASLG, FCER2, FCGRT, FGF8, FN1, FSTL3, FTH1, G6PC, GADD45B, GATA,3 GBP1, GCLC, GCLM, GNAI2, GNB2L1, GNRH2, GZMB, HAMP, HAS1, HBE1, HBZ, HIF1A, HLA-G, HOXA9, HSD11B2, HSP90AA1, IER3, IFNB1, IFNG, IGFBP2, IGHE, IGHG1, IL10, IL11, IL12A, IL12B, IL13, IL17, ILIA, IL1RN, IL27, IL2RA, IL8RA, IL8RB, IL9, IRF2, IRF4, IRF7, JUNB, KCNK5, KCNN2, KISS1, KITLG, KLK3, KLRA1, KRT1,5 KRT3, KRT5, KRT6B, LAMB2, LBP, LCN2, LEF1, LGALS3, LIPG, LTA, LTB, LYZ, MADCAM1, MBP, MMP1, MMP3, MTHFR, MUC2, MYB, MYC, MYLK, MYOZ1, NCAM, NFKB1, NFKBIZ, NLRP2, NOD2, NOS1, NOS2A, NOX1, NPY1R, NQO1, NR4A2, NRG1, NUAK2, OLR1, OPN1SW, OPRD1, OPRM1, ORM1, OXTR, PAFAH2, PDGFB, PDYN, PENK, PGLYRP1, PGR, PIGF, PIGR, PIK3CA, PLAU, PLCD1, PLK3, POMC, PRF1, PRKACA, PRKCD, PRL, PSMB9, PSME1, PSME2, PTEN, PTGDS, PTHLH, PTPN1, PTX3, RAG1, RAG2, RBBP4, REL, RELB, S100A4, S100A6, SAA1, SAT1, SCNN1A, SDC4, SELP, SELS, SERPINA1, SERPINA3, SERPINB1, SERPINE1, SERPINE2, SH3BGRL, SKALP, SKP2 SLC11A2, SLC16A1, SLC3A2, SLC6A6, SNAi1, SOD1, SOD2, SOX9, SPI,1 SPP1, ST6GAL1, ST8S1A1, TACR1, TAP1, TAPBP, TCRB, TERT, TFEC, TFF3, TGM1, TGM2, TICAM1, TLR2, TLR9, TNC, TNFAIP3, TNFRSF4, TNFRSF9, TNFSF10, TNFSF13B, TNFSF15, TNIP3, TP53, TREM1, TRPC1, TWIST1, UPK1B, UPP1, VEGFC, VIM, WT1 and YY1.

[0089] Genes that were associated with a function, based on the differential expression study on public datasets, were preferred for the Function-Associated Target Gene (FATG) list (cf. Table 2).

TABLE 2
Discovery of Function-Associated Target Gene (FATG). The function
was defined based on discovery of genes in the respective datasets.

| Function | Very informative (I+) genes | Informative (I) genes |
|---|---|---|
| Cell division | BCL2, BCL2L1, CCND2, | CSF1, NOX1, |
| | SKP2 | SERPINE2 |
| Cell Apoptosis | CYP27B1, IGHE/IGHG1 | |
| | (same probe sets; could not | |
| | be separated) | |
| Protection | BIRC3, CCL2, GZMB, S0D2 | CCL5, MMP1 |
| oxidative stress | | |

[0090] For each cellular function of NFkB between 2 and 15 NFkB target genes were defined as FATG. Genes were divided in two categories FATGs: (a) category “I+”, meaning very informative with respect to the cellular function, and (b) category “I”, meaning informative. These informative target genes were only included in the FATG list if differential expression results (associated with NFkB function in the discovery datasets compared) agreed with the known biological function. For some genes expression results were obtained with two or more probe sets. Differential expression results of the discovery datasets for the genes of the FATG list are displayed in Tables 3 to 5. Differential expression results of very informative and informative genes have respectively a bold and normal font.

TABLE 3
Results from differential expression study of activated/non-activated
samples to identify the FATG genes. Cellular Function: Cell Division.
Cell division was activated by stimulation with IL2 and blocked by
withdrawal of IL2. Expression levels of “active” cells have been
normalized by the expression level of “inactive” cells
(normalized expression levels).

| | Discovery dataset | |
|---|---|---|
| | GSE7345 | GSE8059 |
| | Comparison (active vs. inactive cell division) | |
| | PBMC: 24 hr/ | NK: 24 hr/Ohr |
| | 0 hr after | stimulation IL-2. |
| | IL-2 withdrawal. | Indicated is delta |
| | Indicated is delta | between |
| | between 24 and 0 hours. | 24 and 0 hours. |
| BCL2L1 | 0.387961 | 2.237027 |
| BCL2L1 | 0.387961 | 1.205173 |
| NOX1 | 0.809677 | 2.798021 |
| SERPINE2 | 2.179479 | 1.738923 |
| BCL2 | 1.904978 | 3.203082 |
| BCL2 | 1.955548 | 2.197475 |
| CSF2 | 2.293724 | 2.276276 |
| CCND2 | 2.117936 | 1.403538 |
| CCND2 | 1.563048 | 1.671844 |
| SKP2 | 0.583479 | 0.898562 |

TABLE 4
Results from differential expression study of activated/non-activated
samples to identify the FATG genes (normalized expression levels).
Cellular Function: Apoptosis.

| | Discovery dataset |
|---|---|
| | GSE17385 |
| | Comparison |
| | MM1.S cells: beta-catenin |
| | knock-down/control |
| CYP27B1 | 2.411292 |
| IGHGI | 2.003433 |
| IGHE | 2.003433 |

TABLE 5
Results from differential expression study of activated/non-activated
samples to identify the FATG genes (normalized expression levels).
Cellular Function: Oxidative stress.

| | Discovery dataset |
|---|---|
| | GSE45827 |
| | Comparison |
| | BC: Basal Sod high/normal |
| BIRC3 | 2.867982 |
| CCL2 | 3.332631 |
| CCL5 | 1.927742 |
| CCL5 | 2.541469 |
| CCL5 | 1.701361 |
| SOD2 | 2.786796 |
| SOD2 | 3.200371 |
| GZMB | 3.456095 |
| MMP1 | 4.539692 |

[0091] It is conceivable that following collection of immune cell data in the future, using this method, the FATG list can be further improved based on data analysis, and target gene combinations selected that further improve the function of the here described NFkB pathway-associated cellular function analysis.

[0092] The FATGs identified above were validated using a ranking model as defined below on validation datasets.

### Computational Model for Validation of FATGs

[0093] Type 1 Model. Function-Associated Expression Average (EA) Ranking Model.

[0094] According to the type 1 model, a cellular function of an active NFkB pathway in a cell is predicted based on measured mRNA levels of FATGs determined in an individual sample.

As an example the mRNA levels are measured on an Affymetrix U133Plus2.0 microarray. First the NFkB activity level is determined using the method disclosed in WO 2017/029215 A1. Subsequently for each NFkB function (cell division, differentiation, chemotaxis, adhesion, apoptosis, oxidative stress) expression levels of the respective FATG genes are taken and amplified by a factor 1 (gene from the FATG category “informative”, called “I”) or 2 (gene from the FATG category“very informative”, called “I+”); subsequently values are added and divided by: the number of informative FATG genes+the number of very informative FATG genes (that have been counted twice). This delivers the expression average, EA, which allows identification of the function with the highest EA This is performed for all functions.

[0095] Subsequently, expression averages (EA) of all these calculations are ranked from high to low, and function(s) of the NFkB pathway can be read from high to low. When the NFkB pathway is active, it can induce either one or multiple cellular functions. Associated EA scores indicate not only which function is the dominant one, but also which other functions were induced by activity of the NFkB pathway.

[0096] The EA can be calculated for each NFkB function as follows:

[0097] EA=[1×(FATG-1,1+FATG-1,2+ . . . FATG-1,N)+2×(FATG-I+,1+FATG-I+,2+ . . . FATG-1+,N)]I[lx (number of FATG-1 genes)+2×(number of FATG-1+genes)], wherein FATG-1 denote expression level of informative gene and 1, 2, . . . , N are informative genes for the respective function, wherein FATG-1+ denote expression level of very informative gene and 1, 2, . . . , N are very informative genes for the respective function.

[0098] NFkB functions can be named according to A=chemotaxis, B=antigen presentation, C=cell adhesion, D=cell differentiation, F=cell apoptosis, F=oxidative stress; EA scores for all functions (A-F) are ranked, associated NFkB functions for the investigated sample are ranked from highest EA score to lowest EA score.

[0099] An oxidative stress function is exemplarily calculated as follows:

[0100] EA=[2×BIRC3+2×CCL2+(CCL5(P1)+CCL5(P2)+CCL5(P3))/3+2×(SOD2(P1)+SOD2(P2))/2+2×GZMB+MMP1]I 10, wherein P1, P2 and P3 refer to three different probe sets used for determining the (normalized) expression level of the same FATG (CCL5).

[0101] The above detailed ranking model has been used to analyze all individual samples of all validation datasets for each of the cellular NFkB functions oxidative stress, apoptosis, and cell division.

[0102] The following Tables 6 to 10 show validation results on public Affymetrix U133Plus2.0 microarray datasets. The GSE number indicates the GEO dataset, GSM numbers indicate individual samples on which an Affymetrix U133 Plus2.0 was performed. EA scores for each function (“CD”=cell division, “APOP”=apoptosis, “OS”=oxidative stress) are indicated per sample (column: “score”), as well as function rank (column: “rank”). Functions are ranked 1 to 3, where 1 has highest EA score and indicates the most dominant cellular function of the active NFkB pathway, and 3 the lowest EA score, indicating the least dominant cellular function. NFkB pathway activity for each individual analyzed sample, ranked from low to high activity score, is given as log 2odds score in column “NFkB log 2odd”.

[0103] Tables 6 to 10 show validation results using dataset GSE45827, with basal-type and luminal A-type breast cancer samples (Gruosso T, Mieulet V, Cardon M, Bourachot B et al., EMBO Mol Med 2016 May; 8(5):527-49). In this study the oxidative stress state was measured in analyzed cancer samples using immunohistochemistry staining developed by the authors. They show that in Lumina A breast cancer oxidative stress is lowest, while highest in basal type breast cancer samples. This was confirmed by the inventor's analyses (van Ooijen et al., The American Journal of Pathology, 2018, vol. 188, no. 9, p. 1956-1972).

[0104] For each cellular function (CD, APOP and OS) a weighted sum of expression levels (“WSE”) is given. The sum of expression levels of the FATGs disclosed herein for the respective cellular function was weighted by the informativeness of the respective cellular function, i.e. 1×(FATG-I,1+FATG-I,2+ . . . FATG-I,N)+2×(FATG-I+,1+FATG-1+,2+ . . . FATG-I,N), as described herein. In case a FATG is represented by 2 or more probe sets, the average of the number of contributing probe-sets is taken. The score was then calculated by dividing this weighted sum of expression levels by the weighted number of FATGs, i.e. 1×(number of FATG-I genes)+2×(number of FATG-1+ genes), as described herein.

TABLE 6
Validation results on GEO dataset GSE45827 with basal-type breast cancer
samples, NFkB pathway active (50% samples with highest NFkB).

| Array ID | CD | | | APOP | | | OS | | | NFkB |
|---|---|---|---|---|---|---|---|---|---|---|
| GSM . . . | WSE | score | rank | WSE | score | rank | WSE | score | rank | log2odd |
| 1116148 | 75.51 | 6.86 | 3 | 37.88 | 9.47 | 2 | 96.88 | 9.69 | 1 | 32.82 |
| 1116102 | 69.85 | 6.35 | 3 | 29.45 | 7.36 | 2 | 84.44 | 8.44 | 1 | 31.67 |
| 1116136 | 77.20 | 7.02 | 3 | 36.46 | 9.12 | 2 | 93.55 | 9.35 | 1 | 31.45 |
| 1116124 | 72.94 | 6.63 | 3 | 38.36 | 9.59 | 2 | 98.70 | 9.87 | 1 | 28.87 |
| 1116145 | 68.90 | 6.26 | 3 | 37.39 | 9.35 | 2 | 90.53 | 9.05 | 1 | 27.01 |
| 1116111 | 73.15 | 6.65 | 3 | 40.43 | 10.11 | 1 | 86.68 | 8.67 | 2 | 26.66 |
| 1116131 | 70.48 | 6.41 | 3 | 37.79 | 9.45 | 2 | 87.05 | 8.70 | 1 | 26.57 |
| 1116091 | 74.16 | 6.74 | 3 | 42.11 | 10.53 | 1 | 92.89 | 9.29 | 2 | 25.31 |
| 1116115 | 78.10 | 7.10 | 3 | 38.94 | 9.73 | 2 | 91.11 | 9.11 | 1 | 25.28 |
| 1116109 | 78.97 | 7.18 | 3 | 40.18 | 10.04 | 1 | 86.37 | 8.64 | 2 | 24.54 |
| 1116101 | 74.36 | 6.76 | 3 | 40.71 | 10.18 | 1 | 90.39 | 9.04 | 2 | 24.32 |
| 1116147 | 69.45 | 6.31 | 3 | 42.05 | 10.51 | 1 | 92.04 | 9.20 | 2 | 23.91 |
| 1116143 | 67.05 | 6.10 | 3 | 38.05 | 9.51 | 1 | 86.12 | 8.61 | 2 | 23.53 |
| 1116090 | 72.59 | 6.60 | 3 | 40.62 | 10.15 | 1 | 88.35 | 8.83 | 2 | 22.79 |
| 1116094 | 74.31 | 6.76 | 3 | 43.87 | 10.97 | 1 | 90.35 | 9.04 | 2 | 22.60 |
| 1116084 | 74.42 | 6.77 | 3 | 38.68 | 9.67 | 1 | 81.83 | 8.18 | 2 | 21.38 |
| 1116112 | 70.41 | 6.40 | 3 | 38.40 | 9.60 | 1 | 77.31 | 7.73 | 2 | 19.26 |
| 1116085 | 72.36 | 6.58 | 3 | 33.46 | 8.36 | 2 | 83.79 | 8.38 | 1 | 19.04 |
| 1116135 | 69.32 | 6.30 | 3 | 38.23 | 9.56 | 1 | 82.40 | 8.24 | 2 | 18.92 |
| 1116144 | 71.83 | 6.53 | 3 | 41.49 | 10.37 | 1 | 82.60 | 8.26 | 2 | 18.30 |
| average | 72.77 | 6.62 | 3 | 38.73 | 9.68 | 1.4 | 88.17 | 8.82 | 1.6 | |

[0105] It can be seen from Table 6 that oxidative stress is prominent (n=8 out of 20 (40%) with score 1 for oxidative stress function) in the samples with NFkB activity (left FIGURE), and apoptosis function ranking as first (1) in 12 out of 20 samples. Since cell division function in general scores 3, it is not the most important function of the NFkB pathway in this basal type breast cancer, which is presumably driven by other cell division pathways, like the PBK and MAPK pathways.

TABLE 7
Validation results on GEO dataset GSE45827 with luminal A-type breast
cancer samples, NFkB pathway active (50% samples with highest NFkB).

| Array ID | CD | | | APOP | | | OS | | | NFkB |
|---|---|---|---|---|---|---|---|---|---|---|
| GSM . . . | WSE | score | rank | WSE | score | rank | WSE | score | rank | log2odd |
| 1116190 | 75.43 | 6.86 | 3 | 41.73 | 10.43 | 1 | 75.85 | 7.58 | 2 | 21.93 |
| 1116222 | 71.60 | 6.51 | 3 | 43.78 | 10.95 | 1 | 72.35 | 7.24 | 2 | 21.13 |
| 1116223 | 70.46 | 6.41 | 3 | 41.24 | 10.31 | 1 | 68.32 | 6.83 | 2 | 18.84 |
| 1116191 | 71.35 | 6.49 | 3 | 36.52 | 9.13 | 1 | 72.07 | 7.21 | 2 | 18.81 |
| 1116235 | 73.06 | 6.64 | 2 | 39.75 | 9.94 | 1 | 63.71 | 6.37 | 3 | 18.58 |
| 1116204 | 71.65 | 6.51 | 3 | 42.51 | 10.63 | 1 | 68.59 | 6.86 | 2 | 14.44 |
| 1116209 | 70.77 | 6.43 | 2 | 41.24 | 10.31 | 1 | 63.68 | 6.37 | 3 | 13.64 |
| 1116203 | 71.26 | 6.48 | 2 | 37.67 | 9.42 | 1 | 60.81 | 6.08 | 3 | 13.11 |
| 1116181 | 73.45 | 6.68 | 3 | 38.36 | 9.59 | 1 | 70.66 | 7.07 | 2 | 12.68 |
| 1116228 | 73.29 | 6.66 | 3 | 40.48 | 10.12 | 1 | 68.63 | 6.86 | 2 | 12.43 |
| 1116194 | 72.68 | 6.61 | 3 | 41.57 | 10.39 | 1 | 68.74 | 6.87 | 2 | 11.68 |
| 1116200 | 72.15 | 6.56 | 2 | 41.23 | 10.31 | 1 | 58.96 | 5.90 | 3 | 10.10 |
| 1116205 | 69.53 | 6.32 | 2 | 41.47 | 10.37 | 1 | 61.87 | 6.19 | 3 | 10.04 |
| 1116231 | 72.22 | 6.57 | 2 | 35.99 | 9.00 | 1 | 61.76 | 6.18 | 3 | 9.08 |
| average | 72.06 | 6.55 | 2.57 | 40.25 | 10.06 | 1 | 66.86 | 6.69 | 2.43 | |

[0106] As can be gathered from Table 7, none of the 14 samples (0%) scores oxidative stress as most prominent function of the active NFkB pathway, instead all 14 samples score apoptosis as prime function. A few of the samples have cell division function scored as (2), suggesting that the NFkB pathway may play a role in cell division in a subset of these tumors.

[0107] To provide additional proof for the correct measurement of the oxidative stress versus apoptosis function of the NFkB pathway, the cell division marker MK. 167 was also measured in these samples, based on the expression levels measured on the Affymetrix microarrays. Results are shown of the four probe sets available on the Affymetrix microarray. Clearly, MK. 167 levels are high in the basal like breast cancer and low in Luminal A, supporting that the apoptosis function was indeed prime in Luminal A, and the oxidative stress function without apoptosis important in many basal-like samples (cf. Table 8).

TABLE 8
MK.167 levels in samples from dataset GSE45827.

| | Basal like breast cancer cells | | | Luminal A type breast cancer cells | | |
|---|---|---|---|---|---|---|
| MK167 probe set | average | max | min | average | max | min |
| MK167 212020_ s_ at | 7.02 | 7.81 | 6.26 | 4.93 | 5.67 | 4.55 |
| MK167 212021_ s_ at | 8.03 | 8.76 | 7.45 | 5.57 | 6.33 | 4.92 |
| MK167 212022_ s_ at | 7.84 | 8.88 | 6.85 | 5.08 | 5.80 | 4.14 |
| MK167 212023_ s_ at | 6.86 | 7.69 | 6.05 | 4.70 | 5.66 | 4.18 |

[0108] In Table 9, the basal like samples with lowest NFkB pathway activity (assuming a very inactive NFkB pathway; notwithstanding, on the relative NFkB pathway activity score scale as described herein, these samples are considered to be active) are shown. The associated MK. 167 expression levels are shown in Table 10. This shows that the cell division in these samples is independent of NFkB activity and caused by another signaling pathway. MK. 167 in basals with low NFkB (indicating an inactive or minimally active pathway) is on average even higher than in basals with high NFkB, strengthening the assumption that cell division in basals is unrelated to NFkB activity.

TABLE 9
Validation results on GEO dataset GSE45827 with Basal breast
cancer samples with low NFkB log2odd values, NFkB pathway
relatively inactive (50% samples with lowest NFkB).

| Array ID | NFkB |
|---|---|
| GSM . . . | log2odd |
| 1116106 | 17.02 |
| 1116139 | 16.22 |
| 1116113 | 14.96 |
| 1116150 | 14.62 |
| 1116120 | 14.59 |
| 1116108 | 13.71 |
| 1116110 | 12.80 |
| 1116130 | 12.51 |
| 1116142 | 12.40 |
| 1116099 | 12.23 |
| 1116119 | 11.21 |
| 1116128 | 9.98 |
| 1116114 | 9.62 |
| 1116092 | 7.84 |
| 1116125 | 6.71 |
| 1116146 | 3.29 |
| 1116087 | 2.78 |
| 1116118 | −2.71 |
| 1116138 | −5.43 |
| 1116093 | −7.52 |
| 1116149 | −7.72 |

TABLE 10
MK. 167 expression levels associated with subjects with Basal
breast cancer with low NFkB log2odd values.

| | MK167_212020_s_at | MK167_212021_s_at | MK167_212022_s_at | MK167_212023_s_at |
|---|---|---|---|---|
| average | 7.31 | 8.39 | 8.23 | 7.12 |
| max | 8.74 | 9.55 | 9.92 | 8.84 |
| min | 6.08 | 6.79 | 6.24 | 6.02 |

[0109] Table 11 shows validation results for a second basal set (GEO dataset GSE76275). The associated MK. 167 expression levels are shown in Table 12. Score, ranking and MKI-67 profile are very similar to the results in regard of GSE45827. It was shown that 11 out of 27 samples (41%) score oxidative stress as the most important function of the NFkB pathway, confirming the results shown in Table 6. MK167 results support the results of oxidative stress associated with high cell division rate.

TABLE 11
Validation results on dataset GSE76275 containing Basal-
like breast cancer samples with an active NFkB pathway.

| Array ID | CD | | | APOP | | | OS | | | NFkB |
|---|---|---|---|---|---|---|---|---|---|---|
| GSM . . . | WSE | score | rank | WSE | score | rank | WSE | score | rank | Iog2odd |
| 1974604 | 77.64 | 7.06 | 3 | 41.00 | 10.25 | 2 | 108.08 | 10.81 | 1 | 31.93 |
| 1974614 | 72.75 | 6.61 | 3 | 37.33 | 9.33 | 2 | 104.02 | 10.40 | 1 | 29.87 |
| 1974626 | 73.99 | 6.73 | 3 | 41.49 | 10.37 | 1 | 91.67 | 9.17 | 2 | 29.76 |
| 1974593 | 71.49 | 6.50 | 3 | 43.28 | 10.82 | 2 | 110.50 | 11.05 | 1 | 28.62 |
| 1974567 | 77.13 | 7.01 | 3 | 36.96 | 9.24 | 2 | 105.20 | 10.52 | 1 | 27.85 |
| 1974738 | 76.85 | 6.99 | 3 | 41.27 | 10.32 | 1 | 99.08 | 9.91 | 2 | 26.90 |
| 1974592 | 77.02 | 7.00 | 3 | 42.16 | 10.54 | 1 | 99.04 | 9.90 | 2 | 25.95 |
| 1974724 | 70.85 | 6.44 | 3 | 34.58 | 8.65 | 2 | 88.17 | 8.82 | 1 | 24.74 |
| 1974721 | 75.84 | 6.89 | 3 | 38.03 | 9.51 | 2 | 107.91 | 10.79 | 1 | 24.65 |
| 1974747 | 78.53 | 7.14 | 3 | 36.47 | 9.12 | 2 | 98.06 | 9.81 | 1 | 24.12 |
| 1974710 | 75.47 | 6.86 | 3 | 40.00 | 10.00 | 1 | 89.16 | 8.92 | 2 | 23.43 |
| 1974628 | 71.43 | 6.49 | 3 | 42.73 | 10.68 | 1 | 95.79 | 9.58 | 2 | 22.85 |
| 1974605 | 84.04 | 7.64 | 3 | 30.81 | 7.70 | 2 | 103.49 | 10.35 | 1 | 22.34 |
| 1974696 | 73.78 | 6.71 | 3 | 38.82 | 9.71 | 2 | 102.24 | 10.22 | 1 | 21.88 |
| 1974659 | 73.12 | 6.65 | 3 | 37.78 | 9.44 | 1 | 93.35 | 9.34 | 2 | 20.87 |
| 1974595 | 76.05 | 6.91 | 3 | 42.96 | 10.74 | 1 | 94.48 | 9.45 | 2 | 20.84 |
| 1974744 | 73.86 | 6.71 | 3 | 39.77 | 9.94 | 1 | 93.89 | 9.39 | 2 | 20.33 |
| 1974732 | 79.58 | 7.23 | 3 | 39.58 | 9.89 | 1 | 96.10 | 9.61 | 2 | 20.31 |
| 1974591 | 74.07 | 6.73 | 3 | 39.27 | 9.82 | 1 | 95.77 | 9.58 | 2 | 20.23 |
| 1974692 | 73.58 | 6.69 | 3 | 41.95 | 10.49 | 1 | 90.44 | 9.04 | 2 | 19.44 |
| 1974718 | 76.59 | 6.96 | 3 | 38.41 | 9.60 | 1 | 93.19 | 9.32 | 2 | 19.11 |
| 1974749 | 73.89 | 6.72 | 3 | 34.86 | 8.71 | 2 | 91.65 | 9.16 | 1 | 17.76 |
| 1974670 | 75.83 | 6.89 | 3 | 37.23 | 9.31 | 1 | 84.65 | 8.46 | 2 | 17.07 |
| 1974691 | 71.51 | 6.50 | 3 | 42.07 | 10.52 | 1 | 88.96 | 8.90 | 2 | 16.94 |
| 1974664 | 72.90 | 6.63 | 3 | 34.76 | 8.69 | 2 | 92.40 | 9.24 | 1 | 16.86 |
| 1974712 | 75.77 | 6.89 | 3 | 40.20 | 10.05 | 1 | 88.07 | 8.81 | 2 | 16.71 |
| 1974679 | 70.66 | 6.42 | 3 | 35.87 | 8.97 | 1 | 82.54 | 8.25 | 2 | 16.29 |
| average | 74.97 | 6.82 | 3 | 38.88 | 9.72 | 1.41 | 95.85 | 9.58 | 1.59 | |

TABLE 12
MK. 167 expression levels associated with Basal-like breast cancer samples
with an active NFkB pathway. Remark: MK. 167 activity levels for all four probe sets
were very low for sample GSM1974732; sample has been excluded from analysis for
being an outlier.

| | MK167_212020_s_at | MK167_212021_s_at | MK167_212022_s_at | MK167_212023_s_at |
|---|---|---|---|---|
| average | 6.96 | 8.18 | 7.64 | 7.09 |
| max | 9.33 | 9.20 | 9.35 | 8.93 |
| min | 5.62 | 6.48 | 6.18 | 5.53 |

[0110] Table 13 shows validation results for GSE43657 dataset SUM159. The associated MK. 167 expression levels are shown in Table 14. The GSE43657 dataset SUM159 contains cell line sample of the inflammatory breast cancer cell line SUM159. As can be seen in both samples Oxidative stress is ranked as (1), and cell-division as (2). The MK. 167 levels are corresponding and high. This indicates that in this cell line oxidative stress is strongly related to the cell division function of NFkB, and the apoptotic pathway which normally protects against the DNA damaging effects of oxidative stress, is not activated by the NFkB pathway. That is, in this dataset NFkB related oxidative stress is high, apoptosis is low.

TABLE 13
Validation results on GSE43657 dataset SUM159. GSM1067679: SUM159 cell line;
GSM1067680: SUM159 sphere. Spheres were obtained by culturing cells in 3D
in a spheroid, which generally reduces cell growth, but due to local hypoxia
is still considered to be more associated with oxidative stress.

| Array ID | CD | | | APOP | | | OS | | | NFkB |
|---|---|---|---|---|---|---|---|---|---|---|
| GSM . . . | WSE | score | rank | WSE | score | rank | WSE | score | rank | log2odd |
| 1067679 | 76.19 | 6.93 | 2 | 25.35 | 6.34 | 3 | 74.84 | 7.48 | 1 | 7.82 |
| 1067680 | 79.54 | 7.23 | 2 | 25.46 | 6.36 | 3 | 77.03 | 7.70 | 1 | 10.94 |
| average | 77.86 | 7.08 | 2 | 25.40 | 6.35 | 3 | 75.94 | 7.59 | 1 | |

TABLE 14
MK.167 expression levels associated with GSE43657 dataset SUM159.
GSM1067679: SUM159 cell line; GSM1067680: SUM159 sphere.

| Array ID | | | | |
|---|---|---|---|---|
| GSM . . . | MK167_212020_s_at | MK167_212021_s_at | MK167_212022_s_at | MK167_212023_s_at |
| 1067679 | 7.68 | 9.03 | 9.36 | 7.90 |
| 1067680 | 6.56 | 8.03 | 8.05 | 7.00 |
| average | 7.12 | 8.53 | 8.70 | 7.45 |

[0111] In summary, it can be seen that the average of the EA scores in Basal like breast cancer group is similar to the average EA scores for the Lumina A type breast cancer group for cell division function; for apoptosis function the average score is higher in the Luminal A group, and for the oxidative stress function the average of this score is much higher in the basal like breast cancer group. These results are in good agreement with literature on this patient cohort (Gruosso et al.; van Ooijen et al.; supra) providing additional support for the model to be able to correctly identify NFkB pathway-associated functions.

[0112] The validation results provide clear evidence that by using certain FATGs a distinction can be made between three important functional states of an active NFkB pathway, that is, oxidative stress, apoptosis, and cell division. An active NFkB pathway can induce transcription of genes like SOD2 which are needed to protect the DNA against the damaging effects of oxidative stress, which is called the “oxidative stress” function. In cancer, this oxidative stress is in general induced by rapid cell division induced by a signaling pathway, which controls cell division. This was clearly observed in the basal like breast cancer samples that were analyzed, and in which MKI67 as cell division marker was high.

[0113] That NFkB was not the pathway causing the cell division (ranked as lowest NFkB function, i.e. rank 3) could be confirmed by the fact that MK167 was just as high in the basal like breast cancer samples with a low NFkB pathway activity; the observed cell division was independent of NFkB pathway activity.

[0114] The NFkB pathway can also direct the cell towards apoptosis, to prevent cell division of cells, whose DNA has been damaged by oxidative stress. In that case the pathway is protecting the tumor against accumulation of more mutations which might promote cancer progression. This situation was observed in the slow growing Luminal A breast cancer, further supported by a low MK167 expression level. This low MK167 level also confirms correctness of the determined rank (rank 3) for the cell division function of the NFkB pathway. Finally, only in the inflammatory breast cancer, dominant NFkB functions were oxidative stress with cell division. This is in line with a general bad prognosis of this tumor type and the role of inflammation (the NFkB pathway being the inflammatory pathway) therein.

[0115] All results provide firm evidence that cellular function such as oxidative stress, apoptosis and cell division of an active NFkB pathway can be correctly ranked and defined based on FATGs, for example by using an FATG EA function ranking for NFkB pathway activity as disclosed herein.

[0116] While the above scoring/ranking methodology (type 1 model) is advantageous in terms of its simplicity and the fact to no information is required from other samples, the present invention shall not be understood to be restricted to specific methodologies but is generally applicable. Alternative methodologies are presented in the following. Notably, the ranking following calculation of EA according to the various models may be identical for all presented scoring models.

Type 2-Model. Normalization Using NFkB Pathway Activity Score.

[0117] According to the type 2-model, the FATG EA score is determined as described above for the type 1-model and then corrected (normalized) by the NFkB pathway activity (score): EA/NFkB pathway activity=normalized EA.

Table 15 shows validation results of the type-2 scoring model. The same dataset as for validation of the type-1 scoring model was used: GSE76275 containing Basal-like breast cancer samples with an active NFkB pathway.

TABLE 15
Type 2-model. Ranking Basals normalized by NFkB log2odd.

| Array ID | CD | | | APOP | | | OS | | | NFkB |
|---|---|---|---|---|---|---|---|---|---|---|
| GSM . . . | | score | rank | | score | rank | | score | rank | log2odd |
| 1974604 | 2.43 | 0.22 | 3 | 1.28 | 0.32 | 2 | 3.05 | 0.30 | 1 | 31.93 |
| 1974614 | 2.44 | 0.22 | 3 | 1.25 | 0.31 | 2 | 3.18 | 0.32 | 1 | 29.87 |
| 1974626 | 2.49 | 0.23 | 3 | 1.39 | 0.35 | 1 | 2.78 | 0.28 | 2 | 29.76 |
| 1974593 | 2.50 | 0.23 | 3 | 1.51 | 0.38 | 2 | 3.47 | 0.35 | 1 | 28.62 |
| 1974567 | 2.77 | 0.25 | 3 | 1.33 | 0.33 | 2 | 3.35 | 0.33 | 1 | 27.85 |
| 1974738 | 2.86 | 0.26 | 3 | 1.53 | 0.38 | 1 | 3.30 | 0.33 | 2 | 26.90 |
| 1974592 | 2.97 | 0.27 | 3 | 1.62 | 0.41 | 1 | 3.40 | 0.34 | 2 | 25.95 |
| 1974724 | 2.86 | 0.26 | 3 | 1.40 | 0.35 | 2 | 3.26 | 0.33 | 1 | 24.74 |
| 1974721 | 3.08 | 0.28 | 3 | 1.54 | 0.39 | 2 | 3.98 | 0.40 | 1 | 24.65 |
| 1974747 | 3.26 | 0.30 | 3 | 1.51 | 0.38 | 2 | 3.69 | 0.37 | 1 | 24.12 |
| 1974710 | 3.22 | 0.29 | 3 | 1.71 | 0.43 | 1 | 3.46 | 0.35 | 2 | 23.43 |
| 1974628 | 3.13 | 0.28 | 3 | 1.87 | 0.47 | 1 | 3.78 | 0.38 | 2 | 22.85 |
| 1974605 | 3.76 | 0.34 | 3 | 1.38 | 0.34 | 2 | 4.21 | 0.42 | 1 | 22.34 |
| 1974696 | 3.37 | 0.31 | 3 | 1.77 | 0.44 | 2 | 4.22 | 0.42 | 1 | 21.88 |
| 1974659 | 3.50 | 0.32 | 3 | 1.81 | 0.45 | 1 | 4.02 | 0.40 | 2 | 20.87 |
| 1974595 | 3.65 | 0.33 | 3 | 2.06 | 0.52 | 1 | 4.08 | 0.41 | 2 | 20.84 |
| 1974744 | 3.63 | 0.33 | 3 | 1.96 | 0.49 | 1 | 4.17 | 0.42 | 2 | 20.33 |
| 1974732 | 3.92 | 0.36 | 3 | 1.95 | 0.49 | 1 | 4.28 | 0.43 | 2 | 20.31 |
| 1974591 | 3.66 | 0.33 | 3 | 1.94 | 0.49 | 1 | 4.32 | 0.43 | 2 | 20.23 |
| 1974692 | 3.79 | 0.34 | 3 | 2.16 | 0.54 | 1 | 4.24 | 0.42 | 2 | 19.44 |
| 1974718 | 4.01 | 0.36 | 3 | 2.01 | 0.50 | 1 | 4.45 | 0.45 | 2 | 19.11 |
| 1974749 | 4.16 | 0.38 | 3 | 1.96 | 0.49 | 2 | 4.66 | 0.47 | 1 | 17.76 |
| 1974670 | 4.44 | 0.40 | 3 | 2.18 | 0.55 | 1 | 4.49 | 0.45 | 2 | 17.07 |
| 1974691 | 4.22 | 0.38 | 3 | 2.48 | 0.62 | 1 | 4.77 | 0.48 | 2 | 16.94 |
| 1974664 | 4.32 | 0.39 | 3 | 2.06 | 0.52 | 2 | 4.99 | 0.50 | 1 | 16.86 |
| 1974712 | 4.53 | 0.41 | 3 | 2.41 | 0.60 | 1 | 4.74 | 0.47 | 2 | 16.71 |
| 1974679 | 4.34 | 0.39 | 3 | 2.20 | 0.55 | 1 | 4.61 | 0.46 | 2 | 16.29 |
| average | 3.46 | 0.31 | 3 | 1.79 | 0.45 | 1.41 | 3.96 | 0.40 | 1.59 | |

[0118] According to the type 2-model, NFkB activity-normalized score with subsequent NFkB function ranking. Normalized EA is obtained by dividing EA by NFkB pathway activity (as described above). Similar to (A) only the sample to analyze is required to calculate the EA score and rank the NFkB functions for the individual sample.

Type 3-Model. Subtraction of Baseline Gene Expression Level from the Activated Sample Gene Expression Level Prior to Calculating EA.

[0119] In yet another model (type 3-model), instead of using absolute gene expression to calculate the EA score, the expression level of each FATG is first corrected for (i.e. subtracted by) the baseline level of the respective FATGs as follows: for each FATG, the mRNA expression is determined for the sample to be analyzed and a reference sample. The reference sample is a cell sample, preferably of the same cell/tissue type as the sample to be analyzed, with low or no NFkB activity. Then, the differential expression is determined for each FATG by subtracting the baseline expression (expression level of reference sample) from the sample expression. The EA can then be calculated with the same equation as shown above. Contrary to the aforementioned models this method requires at least two samples (sample with active NFkB and reference sample with baseline activity).

[0120] Table 16 shows validation results of the type-3 scoring model. The same dataset as for validation of the other scoring models was used: GSE76275 containing Basal-like breast cancer samples with an active NFkB pathway.

TABLE 16
Type 3-model. Ranking Basals based on differential expression (mean
low NFkB luminal AR samples from same dataset subtracted).

| Array ID | CD | | | APOP | | | OS | | | NFkB |
|---|---|---|---|---|---|---|---|---|---|---|
| GSM . . . | | score | rank | | score | rank | | score | rank | Iog2odd |
| 1974604 | 2.80 | 0.25 | 3 | 4.25 | 1.06 | 2 | 36.45 | 3.64 | 1 | 31.93 |
| 1974614 | −2.10 | −0.19 | 3 | 0.57 | 0.14 | 2 | 32.39 | 3.24 | 1 | 29.87 |
| 1974626 | −0.85 | −0.08 | 3 | 4.73 | 1.18 | 2 | 20.04 | 2.00 | 1 | 29.76 |
| 1974593 | −3.36 | −0.31 | 3 | 6.52 | 1.63 | 2 | 38.87 | 3.89 | 1 | 28.62 |
| 1974567 | 2.28 | 0.21 | 2 | 0.21 | 0.05 | 3 | 33.57 | 3.36 | 1 | 27.85 |
| 1974738 | 2.00 | 0.18 | 3 | 4.52 | 1.13 | 2 | 27.44 | 2.74 | 1 | 26.90 |
| 1974592 | 2.17 | 0.20 | 3 | 5.40 | 1.35 | 2 | 27.40 | 2.74 | 1 | 25.95 |
| 1974724 | −4.00 | −0.36 | 2 | −2.17 | −0.54 | 3 | 16.53 | 1.65 | 1 | 24.74 |
| 1974721 | 1.00 | 0.09 | 3 | 1.27 | 0.32 | 2 | 36.27 | 3.63 | 1 | 24.65 |
| 1974747 | 3.68 | 0.33 | 2 | −0.28 | −0.07 | 3 | 26.42 | 2.64 | 1 | 24.12 |
| 1974710 | 0.62 | 0.06 | 3 | 3.25 | 0.81 | 2 | 17.53 | 1.75 | 1 | 23.43 |
| 1974628 | −3.41 | −0.31 | 3 | 5.98 | 1.50 | 2 | 24.15 | 2.42 | 1 | 22.85 |
| 1974605 | 9.19 | 0.84 | 2 | −5.94 | −1.49 | 3 | 31.85 | 3.19 | 1 | 22.34 |
| 1974696 | −1.07 | −0.10 | 3 | 2.07 | 0.52 | 2 | 30.60 | 3.06 | 1 | 21.88 |
| 1974659 | −1.73 | −0.16 | 3 | 1.02 | 0.26 | 2 | 21.72 | 2.17 | 1 | 20.87 |
| 1974595 | 1.20 | 0.11 | 3 | 6.21 | 1.55 | 2 | 22.85 | 2.28 | 1 | 20.84 |
| 1974744 | −0.98 | −0.09 | 3 | 3.02 | 0.75 | 2 | 22.25 | 2.23 | 1 | 20.33 |
| 1974732 | 4.73 | 0.43 | 3 | 2.82 | 0.71 | 2 | 24.46 | 2.45 | 1 | 20.31 |
| 1974591 | −0.78 | −0.07 | 3 | 2.52 | 0.63 | 2 | 24.13 | 2.41 | 1 | 20.23 |
| 1974692 | −1.27 | −0.12 | 3 | 5.20 | 1.30 | 2 | 18.81 | 1.88 | 1 | 19.44 |
| 1974718 | 1.74 | 0.16 | 3 | 1.65 | 0.41 | 2 | 21.55 | 2.16 | 1 | 19.11 |
| 1974749 | −0.95 | −0.09 | 2 | −1.90 | −0.47 | 3 | 20.01 | 2.00 | 1 | 17.76 |
| 1974670 | 0.98 | 0.09 | 3 | 0.47 | 0.12 | 2 | 13.01 | 1.30 | 1 | 17.07 |
| 1974691 | −3.34 | −0.30 | 3 | 5.31 | 1.33 | 2 | 17.32 | 1.73 | 1 | 16.94 |
| 1974664 | −1.94 | −0.18 | 2 | −1.99 | −0.50 | 3 | 20.77 | 2.08 | 1 | 16.86 |
| 1974712 | 0.92 | 0.08 | 3 | 3.44 | 0.86 | 2 | 16.43 | 1.64 | 1 | 16.71 |
| 1974679 | −4.19 | −0.38 | 3 | −0.88 | −0.22 | 2 | 10.91 | 1.09 | 1 | 16.29 |
| average | 0.12 | 0.01 | 2.78 | 2.12 | 0.53 | 2.22 | 24.21 | 2.42 | 1.00 | |

[0121] According to the type 3-model, EA score is corrected for differences in background expression levels of the individual FATG genes, as described before, with subsequent ranking. The method requires, in addition to the sample to be analyzed, also a reference sample with low/absent NFkB activity, preferably of the same cell/tissue type. In this example the average of each target gene of a set of basal like breast cancer samples from the same dataset with a low NFkB activity are taken and subtracted from the expression level of corresponding gene of the basal sample. This differential value is entered in the EA equation, followed by ranking of the NFkB functions.

Type 4-Model. Subtraction of ‘Average Expression of Activated Samples+Baseline Expression/2’ from the Activated Sample Activity, to Calculate the EA.

[0122] In yet another model (type 4-model), to correct the FATG EA score for both the baseline level of the respective FATG and the varying magnitude of the expression increase upon activation, for each FATG the sum of 0.5 times the baseline expression (expression level of reference sample) and the averaged expression of activated samples is subtracted from the expression level of the sample to be analyzed. The EA can then be calculated based on this difference using the same equation as shown above.

[0123] Table 17 shows validation results of the type-4 scoring model. The same dataset as for validation of the other scoring models was used: GSE76275 containing Basal-like breast cancer samples with an active NFkB pathway.

TABLE 17
Type 4-model. Ranking Basals based on differential score
corrected for differences in expression level (average of
mean low NFkB luminal AR and basals (below) subtracted).

| Array ID | CD | | | APOP | | | OS | | | NFkB |
|---|---|---|---|---|---|---|---|---|---|---|
| GSM . . . | | score | rank | | score | rank | | score | rank | Iog2odd |
| 1974604 | 3.80 | 0.35 | 3 | 6.37 | 1.59 | 2 | 36.65 | 3.66 | 1 | 31.93 |
| 1974614 | −1.09 | −0.10 | 3 | 2.69 | 0.67 | 2 | 32.59 | 3.26 | 1 | 29.87 |
| 1974626 | 0.15 | 0.01 | 3 | 6.86 | 1.71 | 2 | 20.24 | 2.02 | 1 | 29.76 |
| 1974593 | −2.36 | −0.21 | 3 | 8.65 | 2.16 | 2 | 39.07 | 3.91 | 1 | 28.62 |
| 1974567 | 3.28 | 0.30 | 3 | 2.33 | 0.58 | 2 | 33.77 | 3.38 | 1 | 27.85 |
| 1974738 | 3.00 | 0.27 | 3 | 6.64 | 1.66 | 2 | 27.65 | 2.76 | 1 | 26.90 |
| 1974592 | 3.17 | 0.29 | 3 | 7.53 | 1.88 | 2 | 27.61 | 2.76 | 1 | 25.95 |
| 1974724 | −3.00 | −0.27 | 3 | −0.05 | −0.01 | 2 | 16.74 | 1.67 | 1 | 24.74 |
| 1974721 | 2.00 | 0.18 | 3 | 3.40 | 0.85 | 2 | 36.48 | 3.65 | 1 | 24.65 |
| 1974747 | 4.68 | 0.43 | 3 | 1.84 | 0.46 | 2 | 26.63 | 2.66 | 1 | 24.12 |
| 1974710 | 1.62 | 0.15 | 3 | 5.37 | 1.34 | 2 | 17.73 | 1.77 | 1 | 23.43 |
| 1974628 | −2.41 | −0.22 | 3 | 8.10 | 2.03 | 2 | 24.35 | 2.44 | 1 | 22.85 |
| 1974605 | 10.19 | 0.93 | 2 | −3.82 | −0.96 | 3 | 32.06 | 3.21 | 1 | 22.34 |
| 1974696 | −0.06 | −0.01 | 3 | 4.19 | 1.05 | 2 | 30.81 | 3.08 | 1 | 21.88 |
| 1974659 | −0.72 | −0.07 | 3 | 3.15 | 0.79 | 2 | 21.92 | 2.19 | 1 | 20.87 |
| 1974595 | 2.20 | 0.20 | 3 | 8.33 | 2.08 | 2 | 23.05 | 2.31 | 1 | 20.84 |
| 1974744 | 0.02 | 0.00 | 3 | 5.14 | 1.29 | 2 | 22.46 | 2.25 | 1 | 20.33 |
| 1974732 | 5.73 | 0.52 | 3 | 4.95 | 1.24 | 2 | 24.67 | 2.47 | 1 | 20.31 |
| 1974591 | 0.22 | 0.02 | 3 | 4.64 | 1.16 | 2 | 24.34 | 2.43 | 1 | 20.23 |
| 1974692 | −0.27 | −0.02 | 3 | 7.32 | 1.83 | 2 | 19.01 | 1.90 | 1 | 19.44 |
| 1974718 | 2.74 | 0.25 | 3 | 3.78 | 0.94 | 2 | 21.75 | 2.18 | 1 | 19.11 |
| 1974749 | 0.05 | 0.00 | 3 | 0.22 | 0.06 | 2 | 20.22 | 2.02 | 1 | 17.76 |
| 1974670 | 1.98 | 0.18 | 3 | 2.59 | 0.65 | 2 | 13.22 | 1.32 | 1 | 17.07 |
| 1974691 | −2.34 | −0.21 | 3 | 7.43 | 1.86 | 2 | 17.53 | 1.75 | 1 | 16.94 |
| 1974664 | −0.94 | −0.09 | 3 | 0.13 | 0.03 | 2 | 20.97 | 2.10 | 1 | 16.86 |
| 1974712 | 1.92 | 0.17 | 3 | 5.56 | 1.39 | 2 | 16.64 | 1.66 | 1 | 16.71 |
| 1974679 | −3.18 | −0.29 | 3 | 1.24 | 0.31 | 2 | 11.11 | 1.11 | 1 | 16.29 |
| average | 1.13 | 0.10 | 2.96 | 4.24 | 1.06 | 2.04 | 24.42 | 2.44 | 1.00 | |

[0124] According to the type 4 model, EA score is based on subtraction of the average levels of gene expression of a group of samples with an active NFkB pathway+the average of a group with low/absent NFkB activity (reference sample/baseline expression), divided by 2, and the expression of the gene in the sample to analyze, with subsequent calculation of EA score and ranking. In this example, the sum of the average of basal like breast samples and the average of an AR-positive subset of basal-like breast cancer samples (from the same dataset with a low NFkB activity) for each target gene divided by two is subtracted from the expression value of individual basal-like subtype breast cancer sample to correct both baseline variation of the different genes and mitigate effect of differences between gene expressions between individual samples.

### Application in the Context of a Clinical Decision Support (CDS) System

[0125] As will have become apparent from the present disclosure, the invention can be advantageously used to support clinical decisions, and may thus be integrated into a clinical decision support (CDS) system. With reference to FIG. 1, a clinical decision support (CDS) system 10 is implemented as a suitably configured computer 12. The computer 12 may be configured to operate as the CDS system 10 by executing suitable software, firmware, or other instructions stored on a non-transitory storage medium (not shown), such as a hard drive or other magnetic storage medium, an optical disk or another optical storage medium, a random access memory (RAM), a read-only memory (ROM), a flash memory, or another electronic storage medium, a network server, or so forth. While the illustrative CDS system 10 is embodied by the illustrative computer 12, more generally the CDS system may be embodied by a digital processing device or an apparatus comprising a digital processor configured to perform clinical decision support methods as set forth herein. For example, the digital processing device may be a handheld device (e.g., a personal data assistant or smartphone running a CDS application), a notebook computer, a desktop computer, a tablet computer or device, a remote network server, or so forth. The computer 12 or other digital processing device typically includes or is operatively connected with a display device 14 via which information including clinical decision support recommendations are displayed to medical personnel. The computer 12 or other digital processing device typically also includes or is operatively connected with one or more user input devices, such as an illustrative keyboard 16, or a mouse, a trackball, a trackpad, a touch-sensitive screen (possibly integrated with the display device 14), or another pointer-based user input device, via which medical personnel can input information such as operational commands for controlling the CDS system 10, data for use by the CDS system 10, or so forth.

[0126] The CDS system 10 receives as input information pertaining to a subject (e.g., a hospital patient, or an outpatient being treated by an oncologist, physician, or other medical personnel, or a person undergoing cancer screening or some other medical diagnosis who is known or suspected to have a certain type of immune-related disease and/or cancer, or a predisposition for developing an immune-related disease and/or cancer. The CDS system 10 applies various data analysis algorithms to this input information in order to generate clinical decision support recommendations that are presented to medical personnel via the display device 14 (or via a voice synthesizer or other device providing human-perceptible output). In some embodiments, these algorithms may include applying a clinical guideline to the patient. A clinical guideline is a stored set of standard or “canonical” treatment recommendations, typically constructed based on recommendations of a panel of medical experts and optionally formatted in the form of a clinical “flowchart” to facilitate navigating through the clinical guideline. In various embodiments the data processing algorithms of the CDS 10 may additionally or alternatively include various diagnostic or clinical test algorithms that are performed on input information to extract clinical decision recommendations, such as machine learning methods disclosed herein.

[0127] In the illustrative CDS systems disclosed herein (e.g., CDS system 10), the CDS data analysis algorithms include one or more diagnostic or clinical test algorithms that are performed on input genomic and/or proteomic information acquired by one or more medical laboratories 18. These laboratories may be variously located “on-site”, that is, at the hospital or other location where the subject is undergoing medical examination and/or treatment, or “off-site”, e.g., a specialized and centralized laboratory that receives (via mail or another delivery service) a sample of the subject that has been extracted from the subject.

[0128] The sample is processed by the laboratory to generate expression levels and optionally further genomic or proteomic information. For example, the sample may be processed using a microarray (also variously referred to in the art as a gene chip, DNA chip, biochip, or so forth) or by quantitative polymerase chain reaction (qPCR) processing to measure probative genomic or proteomic information such as expression levels of genes of interest (i.e. one or more FATGs), for example in the form of a level of messenger ribonucleic acid (mRNA) that is transcribed from the gene, or a level of a protein that is translated from the mRNA transcribed from the gene.

[0129] In some embodiments, the sample may be processed by a gene sequencing laboratory to generate sequences for deoxyribonucleic acid (DNA), or to generate an RNA sequence, copy number variation, methylation, or so forth. Other contemplated measurement approaches include immunohistochemistry (IHC), cytology, fluorescence in situ hybridization (FISH), proximity ligation assay or so forth, performed on a pathology slide. Other information that can be generated by microarray processing, mass spectrometry, gene sequencing, or other laboratory techniques includes methylation information. Various combinations of such genomic and/or proteomic measurements may also be performed.

[0130] In some embodiments, the medical laboratories 18 perform a number of standardized data acquisitions on the sample of the subject, so as to generate a large quantity of genomic and/or proteomic data. For example, the standardized data acquisition techniques may generate an (optionally aligned) DNA sequence for one or more chromosomes or chromosome portions, or for the entire genome. Applying a standard microarray can generate thousands or tens of thousands of data items such as expression levels for a large number of genes, various methylation data, and so forth. Similarly, PCR-based measurements can be used to measure the expression level of a selection of genes. This plethora of genomic and/or proteomic data, or selected portions thereof, are input to the CDS system 10 to be processed so as to develop clinically useful information for formulating clinical decision support recommendations.

[0131] The disclosed CDS systems and related methods relate to processing of genomic and/or proteomic data to assess expression level of certain function-associated target genes (FATGs) of an active NFkB cellular signaling pathway and to determine a cellular function of an active NFkB cellular signaling pathway in a cell sample. However, it is to be understood that the disclosed CDS systems (e.g., CDS system 10) may optionally further include diverse additional capabilities, such as generating clinical decision support recommendations in accordance with stored clinical guidelines based on various patient data such as vital sign monitoring data, patient history data, patient demographic data (e.g., gender, age, or so forth), patient medical imaging data, or so forth. Alternatively, in some embodiments the capabilities of the CDS system 10 may be limited to only performing genomic and/or proteomic data analyses to assess the expression level of certain function-associated target genes (FATGs) of an active NFkB cellular signaling pathway and to determine a cellular function of an active NFkB cellular signaling pathway in a cell sample, as disclosed herein.

[0132] With continuing reference to exemplary FIG. 1, the CDS system 10 determines a score 22 for each cellular function (e.g. expression average for apoptosis, cell division and oxidative stress protection; EA_A, EA_D, EA_F) based on expression levels 20 of one or more respective function-associated target genes of an active NFkB cellular signaling pathway activity measured in the sample of the subject.

[0133] The determined scores 22 are then used for differentiation 24 between the evaluated cellular functions in order to determine the most predominant cellular function 24 (or provide a ranking as disclosed herein) and/or provide additional information 28 relating to clinical recommendation based on the determined cellular function.

SEQUENCE LISTING:

| Seq. ID No.: | Gene: |
|---|---|
| Seq. ID No. 1 | BCL2 |
| Seq. ID No. 2 | BCL2L1 |
| Seq. ID No. 3 | BIRC3 |
| Seq. ID No. 4 | CCL2 |
| Seq. ID No. 5 | CCL5 |
| Seq. ID No. 6 | CCND2 |
| Seq. ID No. 7 | CSF2 |
| Seq. ID No. 8 | CYP27B1 |
| Seq. ID No. 9 | GZMB |
| Seq. ID No. 10 | IGHE/IGHG1 (could not be separated) |
| Seq. ID No. 11 | MMP1 |
| Seq. ID No. 12 | NOX1 |
| Seq. ID No. 13 | SERPINE2 |
| Seq. ID No. 14 | SKP2 |
| Seq. ID No. 15 | SOD2 |

1. A method for determining a cellular function of an active NFkB cellular signaling pathway in a cell sample containing cells with an active NFkB cellular signaling pathway, the method comprising:
determining the expression level of two or more genes selected from the group 1 consisting of BCL2, BCL2L1, CCND2, SKP2, CSF1, NOX1 and SERPINE2; and
determining the expression level of two genes selected from group 2 consisting of CYP27B1, IGHE/IGHG1; and
determining the expression level of two or more genes selected from group 3 consisting of BIRC3, CCL2, GZMB, SOD2, CCL5 and MMP1, and
determining the cellular function based on expression level the selected genes of groups 1, 2 and 3.

2. The method according to claim 1, wherein the expression levels of all of the genes of groups 1, 2 and 3 are determined.

3. The method according to claim 1,
wherein the cellular function is selected from the group consisting of cell division, apoptosis and oxidative stress protection.

4. The method according to claim 1, wherein the cellular function is determined by differential expression analysis of the expression levels of the selected genes of groups 1, 2 and 3, wherein the cellular function is determined to be cell division if the genes selected from group 1 are differentially expressed, wherein the cellular function is determined to be apoptosis if the genes selected from group 2 are differentially expressed, and/or wherein the cellular function is determined to be protection against oxidative stress if the genes selected from group 3 are differentially expressed.

5. The method according to claim 1,
wherein the cellular function is determined based on evaluating a mathematical model relating the expression levels of the genes selected from each group to the cellular function.

6. The method according to claim 5,
wherein the expression levels of the genes selected from each group are normalized by and/or corrected for one or more of the following:
activity of the NFkB cellular signaling pathway in the cell sample;
baseline expression level of the respective NFkB target gene(s); and/or
average expression levels of the respective NFkB target gene(s) in a group of samples comprising cells with an active NFkB pathway.

7. The method according to claim 1,
wherein the cell sample is derived from a tissue, cells, blood, a body fluid, a cell line, a cell culture and/or a tissue culture.

8. The method according to claim 1,
wherein the cells contained in the cell sample are selected from the group consisting of immune cells and cancer cells and/or wherein the cells are obtained from a subject having, or suspected of having, or having a predisposition of acquiring, an immune-related condition such as kidney transplantation, rheumatoid arthritis, psoriasis, diabetes and preferably cancer.

9. The method according to claim 1,
wherein the cell sample containing cells with an active NFkB cellular signaling pathway is selected based on activity of the NFkB cellular signaling pathway in the cells contained in the cell sample,
wherein the activity of the NFkB cellular signaling pathway in the cells is inferred or inferable by a method comprising:
receiving expression levels of one or more and preferably six or more target genes of the NFkB cellular signaling pathway,
determining an level of an NFkB transcription factor (TF) element, the NFkB TF element controlling transcription of the one or more and preferably six or more target genes of the NFkB cellular signaling pathway, the determining being based at least in part on evaluating a mathematical model relating expression levels of the one or more and preferably six or more target genes of the NFkB cellular signaling pathway to the level of the NFkB TF element, wherein the one or more and preferably six or more target genes are selected from the group consisting of: BCL2L1, BIRC3, CCL2, CCL3, CCL4, CCL5, CCL20, CCL22, CX3CL1, CXCL1, CXCL2, CXCL3, ICAM1, IL1B, IL6, IL8, IRF1, MMP9, NFKB2, NFKBIA, NFKBIE, PTGS2, SELE, STAT5A, TNF, TNFAIP2, TNIP 1, TRAF 1 and VCAM1;
inferring the activity of the NFkB cellular signaling pathway based on the determined level of the NFkB TF element in the sample,
wherein the inferring is performed by a digital processing device using the mathematical model.

10. The method according to claim 1,
further comprising one or more of the following:
monitoring the at least one cellular function of the active NFkB cellular signaling pathway;
monitoring an effect of a therapy, preferably an immunotherapy, on the at least one cellular function of the active NFkB pathway;
identifying a mechanism of a drug targeting the NFkB cellular signaling pathway;
predicting or monitoring response to a drug targeting the NFkB cellular signaling pathway; and/or
predicting whether immune cells exert a tumor suppressive or a tumor promoting effect;
predicting therapy response, in particular response to immunotherapy;
predicting response to a combination immunotherapy as compared to monotherapy, predicting whether a therapy, in particular an immunotherapy, is effective in view of side effects and/or costs; and/or
identifying patients that are at risk of severe side-effects.

11. An apparatus for determining at least one cellular function of an active NFkB cellular signaling pathway comprising at least one digital processor configured to perform the method of claim 10.

12. A non transitory storage medium for determining at least one cellular function of an active NFkB cellular signaling pathway storing instructions that are executable by a digital processing device to perform the method of claim 10.

13. A computer program for determining at least one cellular function of an active NFkB cellular signaling pathway comprising program code means for causing a digital processing device to perform a method of claim 1, when the computer program is run on the digital processing device.

14. A kit comprising:
components for determining the expression levels of two or more genes selected from the group consisting of BCL2, BCL2L1, CCND2, SKP2, CSF1, NOX1 and SERPINE2, wherein the components for determining the expression levels are polymerase chain reaction primers directed to the selected genes and probes directed to the selected genes; and
components for determining the expression levels of two genes selected from group consisting of CYP27B1, IGHE/IGHG1, wherein the components for determining the expression levels are polymerase chain reaction primers directed to the selected genes and probes directed to the selected genes; and
components for determining the expression levels of two or more genes selected from group consisting of BIRC3, CCL2, GZMB, SOD2, CCL5 and MMP1, wherein the components for determining the expression levels are polymerase chain reaction primers directed to the selected genes and probes directed to the selected genes,
and optionally the kit further comprising:
polymerase chain reaction primers and probes directed to six or more NFkB target genes selected from the group consisting of: BCL2L1, BIRC3, BCL2L1, BIRC3, CCL2, CCL3, CCL4, CCL5, CCL20, CCL22, CX3CL1, CXCL1, CXCL2, CXCL3, ICAM1, IL1B, IL6, IL8, IRF1, MMP9, NFKB2, NFKBIA, NFKBIE, PTGS2, SELE, STAT5A, TNF, TNFAIP2, TNIP1, TRAF1, and VCAM1, preferably wherein said six or more target genes are selected from the group consisting of CXCL2, ICAM1, IL6, CCL5, NFKBIA, IL8, TNFAIP2, CXCL3, MMP9, NFKB2, CCL20, CCL2, and CXCL1, more preferably wherein said six or more target genes are selected from the group consisting of CXCL2, ICAM1, IL6, CCL5, NFKBIA, IL8, and TNFAIP2, and/or
the non-transitory storage medium of claim 12.

15. A method for diagnosing a mammal with an immune related disease and/or cancer using a kit, the diagnosis being based on determining at least one cellular function of an active NFkB cellular signaling pathway in the mammal, the kit comprising:
components for determining the expression levels of two or more genes selected from the group consisting of BCL2, BCL2L1, CCND2, SKP2, CSF1, NOX1 and SERPINE2, wherein the components for determining the expression levels are polymerase chain reaction primers directed to the selected genes and probes directed to the selected genes; and
components for determining the expression levels of two genes selected from group consisting of CYP27B1, IGHE/IGHG1, wherein the components for determining the expression levels are polymerase chain reaction primers directed to the selected genes and probes directed to the selected genes; and
components for determining the expression levels of two or more genes selected from group consisting of BIRC3, CCL2, GZMB, SOD2, CCL5 and MMP1, wherein the components for determining the expression levels are polymerase chain reaction primers directed to the selected genes and probes directed to the selected genes,
and optionally further comprising:
polymerase chain reaction primers and probes directed to six or more NFkB target genes selected from the group consisting of: BCL2L1, BIRC3, CCL2, CCL3, CCL4, CCL5, CCL20, CCL22, CX3CL1, CXCL1, CXCL2, CXCL3, ICAM1, IL1B, IL6, IL8, IRF1, MMP9, NFKB2, NFKBIA, NFKBIE, PTGS2, SELE, STAT5A, TNF, TNFAIP2, TNIP1, TRAF1, and VCAM1, preferably wherein said six or more target genes are selected from the group consisting of CXCL2, ICAM1, IL6, CCL5, NFKBIA, IL8, TNFAIP2, CXCL3, MMP9, NFKB2, CCL20, CCL2, and CXCL1, more preferably wherein said six or more target genes are selected from the group consisting of CXCL2, ICAM1, IL6, CCL5, NFKBIA, IL8, and TNFAIP2, and/or
the computer program of claim 13.

The application's sequence listing, which the Patent Office published only in electronic form, follows.

SEQUENCE LISTING (15 sequences)

SEQ ID NO: 1 - DNA, 6492 bp, Homo sapiens
tttctgtgaagcagaagtctgggaatcgatctggaaatcctcctaatttttactccctctccccgcgactcctgattcattgggaagtttcaaatcagctataactggagagtgctgaagattgatgggatcgttgccttatgcatttgttttggttttacaaaaaggaaacttgacagaggatcatgctgtacttaaaaaatacaacatcacagaggaagtagactgatattaacaatacttactaataataacgtgcctcatgaaataaagatccgaaaggaattggaataaaaatttcctgcatctcatgccaagggggaaacaccagaatcaagtgttccgcgtgattgaagacaccccctcgtccaagaatgcaaagcacatccaataaaatagctggattataactcctcttctttctctgggggccgtggggtgggagctggggcgagaggtgccgttggcccccgttgcttttcctctgggaaggatggcgcacgctgggagaacagggtacgataaccgggagatagtgatgaagtacatccattataagctgtcgcagaggggctacgagtgggatgcgggagatgtgggcgccgcgcccccgggggccgcccccgcaccgggcatcttctcctcccagcccgggcacacgccccatccagccgcatcccgggacccggtcgccaggacctcgccgctgcagaccccggctgcccccggcgccgccgcggggcctgcgctcagcccggtgccacctgtggtccacctgaccctccgccaggccggcgacgacttctcccgccgctaccgccgcgacttcgccgagatgtccagccagctgcacctgacgcccttcaccgcgcggggacgctttgccacggtggtggaggagctcttcagggacggggtgaactgggggaggattgtggccttctttgagttcggtggggtcatgtgtgtggagagcgtcaaccgggagatgtcgcccctggtggacaacatcgccctgtggatgactgagtacctgaaccggcacctgcacacctggatccaggataacggaggctgggatgcctttgtggaactgtacggccccagcatgcggcctctgtttgatttctcctggctgtctctgaagactctgctcagtttggccctggtgggagcttgcatcaccctgggtgcctatctgggccacaagtgaagtcaacatgcctgccccaaacaaatatgcaaaaggttcactaaagcagtagaaataatatgcattgtcagtgatgtaccatgaaacaaagctgcaggctgtttaagaaaaaataacacacatataaacatcacacacacagacagacacacacacacacaacaattaacagtcttcaggcaaaacgtcgaatcagctatttactgccaaagggaaatatcatttattttttacattattaagaaaaaaagatttatttatttaagacagtcccatcaaaactcctgtctttggaaatccgaccactaattgccaagcaccgcttcgtgtggctccacctggatgttctgtgcctgtaaacatagattcgctttccatgttgttggccggatcaccatctgaagagcagacggatggaaaaaggacctgatcattggggaagctggctttctggctgctggaggctggggagaaggtgttcattcacttgcatttctttgccctgggggctgtgatattaacagagggagggttcctgtggggggaagtccatgcctccctggcctgaagaagagactctttgcatatgactcacatgatgcatacctggtgggaggaaaagagttgggaacttcagatggacctagtacccactgagatttccacgccgaaggacagcgatgggaaaaatgcccttaaatcataggaaagtatttttttaagctaccaattgtgccgagaaaagcattttagcaatttatacaatatcatccagtaccttaagccctgattgtgtatattcatatattttggatacgcaccccccaactcccaatactggctctgtctgagtaagaaacagaatcctctggaacttgaggaagtgaacatttcggtgacttccgcatcaggaaggctagagttacccagagcatcaggccgccacaagtgcctgcttttaggagaccgaagtccgcagaacctgcctgtgtcccagcttggaggcctggtcctggaactgagccggggccctcactggcctcctccagggatgatcaacagggcagtgtggtctccgaatgtctggaagctgatggagctcagaattccactgtcaagaaagagcagtagaggggtgtggctgggcctgtcaccctggggccctccaggtaggcccgttttcacgtggagcatgggagccacgacccttcttaagacatgtatcactgtagagggaaggaacagaggccctgggcccttcctatcagaaggacatggtgaaggctgggaacgtgaggagaggcaatggccacggcccattttggctgtagcacatggcacgttggctgtgtggccttggcccacctgtgagtttaaagcaaggctttaaatgactttggagagggtcacaaatcctaaaagaagcattgaagtgaggtgtcatggattaattgacccctgtctatggaattacatgtaaaacattatcttgtcactgtagtttggttttatttgaaaacctgacaaaaaaaaagttccaggtgtggaatatgggggttatctgtacatcctggggcattaaaaaaaaaatcaatggtggggaactataaagaagtaacaaaagaagtgacatcttcagcaaataaactaggaaatttttttttcttccagtttagaatcagccttgaaacattgatggaataactctgtggcattattgcattatataccatttatctgtattaactttggaatgtactctgttcaatgtttaatgctgtggttgatatttcgaaagctgctttaaaaaaatacatgcatctcagcgtttttttgtttttaattgtatttagttatggcctatacactatttgtgagcaaaggtgatcgttttctgtttgagatttttatctcttgattcttcaaaagcattctgagaaggtgagataagccctgagtctcagctacctaagaaaaacctggatgtcactggccactgaggagctttgtttcaaccaagtcatgtgcatttccacgtcaacagaattgtttattgtgacagttatatctgttgtccctttgaccttgtttcttgaaggtttcctcgtccctgggcaattccgcatttaattcatggtattcaggattacatgcatgtttggttaaacccatgagattcattcagttaaaaatccagatggcaaatgaccagcagattcaaatctatggtggtttgacctttagagagttgctttacgtggcctgtttcaacacagacccacccagagccctcctgccctccttccgcgggggctttctcatggctgtccttcagggtcttcctgaaatgcagtggtgcttacgctccaccaagaaagcaggaaacctgtggtatgaagccagacctccccggcgggcctcagggaacagaatgatcagacctttgaatgattctaatttttaagcaaaatattattttatgaaaggtttacattgtcaaagtgatgaatatggaatatccaatcctgtgctgctatcctgccaaaatcattttaatggagtcagtttgcagtatgctccacgtggtaagatcctccaagctgctttagaagtaacaatgaagaacgtggacgtttttaatataaagcctgttttgtcttttgttgttgttcaaacgggattcacagagtatttgaaaaatgtatatatattaagaggtcacgggggctaattgctggctggctgccttttgctgtggggttttgttacctggttttaataacagtaaatgtgcccagcctcttggccccagaactgtacagtattgtggctgcacttgctctaagagtagttgatgttgcattttccttattgttaaaaacatgttagaagcaatgaatgtatataaaagcctcaactagtcatttttttctcctcttcttttttttcattatatctaattattttgcagttgggcaacagagaaccatccctattttgtattgaagagggattcacatctgcatcttaactgctctttatgaatgaaaaaacagtcctctgtatgtactcctctttacactggccagggtcagagttaaatagagtatatgcactttccaaattggggacaagggctctaaaaaaagccccaaaaggagaagaacatctgagaacctcctcggccctcccagtccctcgctgcacaaatactccgcaagagaggccagaatgacagctgacagggtctatggccatcgggtcgtctccgaagatttggcaggggcagaaaactctggcaggcttaagatttggaataaagtcacagaattaaggaagcacctcaatttagttcaaacaagacgccaacattctctccacagctcacttacctctctgtgttcagatgtggccttccatttatatgtgatctttgttttattagtaaatgcttatcatctaaagatgtagctctggcccagtgggaaaaattaggaagtgattataaatcgagaggagttataataatcaagattaaatgtaaataatcagggcaatcccaacacatgtctagctttcacctccaggatctattgagtgaacagaattgcaaatagtctctatttgtaattgaacttatcctaaaacaaatagtttataaatgtgaacttaaactctaattaattccaactgtacttttaaggcagtggctgtttttagactttcttatcacttatagttagtaatgtacacctactctatcagagaaaaacaggaaaggctcgaaatacaagccattctaaggaaattagggagtcagttgaaattctattctgatcttattctgtggtgtcttttgcagcccagacaaatgtggttacacactttttaagaaatacaattctacattgtcaagcttatgaaggttccaatcagatctttattgttattcaatttggatctttcagggattttttttttaaattattatgggacaaaggacatttgttggaggggtgggagggaggaagaatttttaaatgtaaaacattcccaagtttggatcagggagttggaagttttcagaataaccagaactaagggtatgaaggacctgtattggggtcgatgtgatgcctctgcgaagaaccttgtgtgacaaatgagaaacattttgaagtttgtggtacgacctttagattccagagacatcagcatggctcaaagtgcagctccgtttggcagtgcaatggtataaatttcaagctggatatgtctaatgggtatttaaacaataaatgtgcagttttaactaacaggatatttaatgacaaccttctggttggtagggacatctgtttctaaatgtttattatgtacaatacagaaaaaaattttataaaattaagcaatgtgaaactgaattggagagtgataatacaagtcctttagtcttacccagtgaatcattctgttccatgtctttggacaaccatgaccttggacaatcatgaaatatgcatctcactggatgcaaagaaaatcagatggagcatgaatggtactgtaccggttcatctggactgccccagaaaaataacttcaagcaaacatcctatcaacaacaaggttgttctgcataccaagctgagcacagaagatgggaacactggtggaggatggaaaggctcgctcaatcaagaaaattctgagactattaataaataagactgtagtgtagatactgagtaaatccatgcacctaaaccttttggaaaatctgccgtgggccctccagatagctcatttcattaagtttttccctccaaggtagaatttgcaagagtgacagtggattgcatttcttttggggaagctttcttttggtggttttgtttattataccttcttaagttttcaaccaaggtttgcttttgttttgagttactggggttatttttgttttaaataaaaataagtgtacaataagtgtttttgtattgaaagcttttgttatcaagattttcatacttttaccttccatggctctttttaagattgatacttttaagaggtggctgatattctgcaacactgtacacataaaaaatacggtaaggatactttacatggttaaggtaaagtaagtctccagttggccaccattagctataatggcactttgtttgtgttgttggaaaaagtcacattgccattaaactttccttgtctgtctagttaatattgtgaagaaaaataaagtacagtgtgagatactg

SEQ ID NO: 2 - DNA, 2575 bp, Homo sapiens
ggaggaggaagcaagcgagggggctggttcctgagcttcgcaattcctgtgtcgccttctgggctcccagcctgccgggtcgcatgatccctccggccggagctggtttttttgccagccaccgcgaggccggctgagttaccggcatccccgcagccacctcctctcccgacctgtgatacaaaagatcttccgggggctgcacctgcctgcctttgcctaaggcggatttgaatctctttctctcccttcagaatcttatcttggctttggatcttagaagagaatcactaaccagagacgagactcagtgagtgagcaggtgttttggacaatggactggttgagcccatccctattataaaaatgtctcagagcaaccgggagctggtggttgactttctctcctacaagctttcccagaaaggatacagctggagtcagtttagtgatgtggaagagaacaggactgaggccccagaagggactgaatcggagatggagacccccagtgccatcaatggcaacccatcctggcacctggcagacagccccgcggtgaatggagccactggccacagcagcagtttggatgcccgggaggtgatccccatggcagcagtaaagcaagcgctgagggaggcaggcgacgagtttgaactgcggtaccggcgggcattcagtgacctgacatcccagctccacatcaccccagggacagcatatcagagctttgaacaggtagtgaatgaactcttccgggatggggtaaactggggtcgcattgtggcctttttctccttcggcggggcactgtgcgtggaaagcgtagacaaggagatgcaggtattggtgagtcggatcgcagcttggatggccacttacctgaatgaccacctagagccttggatccaggagaacggcggctgggatacttttgtggaactctatgggaacaatgcagcagccgagagccgaaagggccaggaacgcttcaaccgctggttcctgacgggcatgactgtggccggcgtggttctgctgggctcactcttcagtcggaaatgaccagacactgaccatccactctaccctcccacccccttctctgctccaccacatcctccgtccagccgccattgccaccaggagaaccactacatgcagcccatgcccacctgcccatcacagggttgggcccagatctggtcccttgcagctagttttctagaatttatcacacttctgtgagacccccacacctcagttcccttggcctcagaattcacaaaatttccacaaaatctgtccaaaggaggctggcaggtatggaagggtttgtggctgggggcaggagggccctacctgattggtgcaacccttaccccttagcctccctgaaaatgtttttctgccagggagcttgaaagttttcagaacctcttccccagaaaggagactagattgcctttgttttgatgtttgtggcctcagaattgatcattttccccccactctccccacactaacctgggttccctttccttccatccctaccccctaagagccatttaggggccacttttgactagggattcaggctgcttgggataaagatgcaaggaccaggactccctcctcacctctggactggctagagtcctcactcccagtccaaatgtcctccagaagcctctggctagaggccagccccacccaggagggagggggctatagctacaggaagcaccccatgccaaagctagggtggcccttgcagttcagcaccaccctagtcccttcccctccctggctcccatgaccatactgagggaccaactgggcccaagacagatgccccagagctgtttatggcctcagctgcctcacttcctacaagagcagcctgtggcatctttgccttgggctgctcctcatggtgggttcaggggactcagccctgaggtgaaagggagctatcaggaacagctatgggagccccagggtcttccctacctcaggcaggaagggcaggaaggagagcctgctgcatggggtggggtagggctgactagaagggccagtcctgcctggccaggcagatctgtgccccatgcctgtccagcctgggcagccaggctgccaaggccagagtggcctggccaggagctcttcaggcctccctctctcttctgctccacccttggcctgtctcatccccaggggtcccagccaccccgggctctctgctgtacatatttgagactagtttttattccttgtgaagatgatatactatttttgttaagcgtgtctgtatttatgtgtgaggagctgctggcttgcagtgcgcgtgcacgtggagagctggtgcccggagattggacggcctgatgctccctcccctgccctggtccagggaagctggccgagggtcctggctcctgaggggcatctgcccctcccccaacccccaccccacacttgttccagctctttgaaatagtctgtgtgaaggtgaaagtgcagttcagtaataaactgtgtttactcagtgaaaaaaaaaaaaaaaaaa

SEQ ID NO: 3 - DNA, 6932 bp, Homo sapiens
gcatttaaaagacagcgtgagactcgcgccctccggcacggaaaaggccaggcgacaggtgtcgcttgaaaagactgggcttgtccttgctggtgcatgcgtcgtcggcctctgggcagcaggtttacaaaggaggaaaacgacttcttctagatttttttttcagtttcttctataaatcaaaacatctcaaaatggagacctaaaatccttaaagggacttagtctaatctcgggaggtagttttgtgcatgggtaaacaaattaagtattaactggtgttttactatccaaagaatgctaattttataaacatgatcgagttatataaggtataccataatgagtttgattttgaatttgatttgtggaaataaaggaaaagtgattctagctggggcatattgttaaagcatttttttcagagttggccaggcagtctcctactggcacattctcccattatgtagaatagaaatagtacctgtgtttgggaaagattttaaaatgagtgacagttatttggaacaaagagctaataatcaatccactgcaaattaaagaaacatgcagatgaaagttttgacacattaaaatacttctacagtgacaaagaaaaatcaagaacaaagctttttgatatgtgcaacaaatttagaggaagtaaaaagataaatgtgatgattggtcaagaaattatccagttatttacaaggccactgatattttaaacgtccaaaagtttgtttaaatgggctgttaccgctgagaatgatgaggatgagaatgatggttgaaggttacattttaggaaatgaagaaacttagaaaattaatataaagacagtgatgaatacaaagaagatttttataacaatgtgtaaaatttttggccagggaaaggaatattgaagttagatacaattacttacctttgagggaaataattgttggtaatgagatgtgatgtttctcctgccacctggaaacaaagcattgaagtctgcagttgaaaagcccaacgtctgtgagatccaggaaaccatgcttgcaaaccactggtaaaaaaaaaaaaaaaaaaaaaaaaaagccacagtgacttgcttattggtcattgctagtattatcgactcagaacctctttactaatggctagtaaatcataattgagaaattctgaattttgacaaggtctctgctgttgaaatggtaaatttattattttttttgtcatgataaattctggttcaaggtatgctatccatgaaataatttctgaccaaaactaaattgatgcaatttgattatccatcttagcctacagatggcatctggtaacttttgactgttttaaaaaataaatccactatcagagtagatttgatgttggcttcagaaacatttagaaaaacaaaagttcaaaaatgttttcaggaggtgataagttgaataactctacaatgttagttctttgagggggacaaaaaatttaaaatctttgaaaggtcttattttacagccatatctaaattatcttaagaaaatttttaacaaagggaatgaaatatatatcatgattctgtttttccaaaagtaacctgaatatagcaatgaagttcagttttgttattggtagtttgggcagagtctctttttgcagcacctgttgtctaccataattacagaggacatttccatgttctagccaagtatactattagaataaaaaaacttaacattgagttgcttcaacagcatgaaactgagtccaaaagaccaaatgaacaaacacattaatctctgattatttattttaaatagaatatttaattgtgtaagatctaatagtatcattatacttaagcaatcatattcctgatgatctatgggaaataactattatttaattaatattgaaaccaggttttaagatgtgttagccagtcctgttactagtaaatctctttatttggagagaaattttagattgttttgttctccttattagaaggattgtagaaagaaaaaaatgactaattggagaaaaattggggatatatcatatttcactgaattcaaaatgtcttcagttgtaaatcttaccattattttacgtacctctaagaaataaaagtgcttctaattaaaatatgatgtcattaattatgaaatacttcttgataacagaagttttaaaatagccatcttagaatcagtgaaatatggtaatgtattattttcctcctttgagttaggtcttgtgcttttttttcctggccactaaatttcacaatttccaaaaagcaaaataaacatattctgaatatttttgctgtgaaacacttgacagcagagctttccaccatgaaaagaagcttcatgagtcacacattacatctttgggttgattgaatgccactgaaacattctagtagcctggagaagttgacctacctgtggagatgcctgccattaaatggcatcctgatggcttaatacacatcactcttctgtgaagggttttaattttcaacacagcttactctgtagcatcatgtttacattgtatgtataaagattatacaaaggtgcaattgtgtatttcttccttaaaatgtatcagtataggatttagaatctccatgttgaaactctaaatgcatagaaataaaaataataaaaaatttttcattttggcttttcagcctagtattaaaactgataaaagcaaagccatgcacaaaactacctccctagagaaaggctagtcccttttcttccccattcatttcattatgaacatagtagaaaacagcatattcttatcaaatttgatgaaaagcgccaacacgtttgaactgaaatacgacttgtcatgtgaactgtaccgaatgtctacgtattccacttttcctgctggggttcctgtctcagaaaggagtcttgctcgtgctggtttctattacactggtgtgaatgacaaggtcaaatgcttctgttgtggcctgatgctggataactggaaaagaggagacagtcctactgaaaagcataaaaagttgtatcctagctgcagattcgttcagagtctaaattccgttaacaacttggaagctacctctcagcctacttttccttcttcagtaacaaattccacacactcattacttccgggtacagaaaacagtggatatttccgtggctcttattcaaactctccatcaaatcctgtaaactccagagcaaatcaagatttttctgccttgatgagaagttcctaccactgtgcaatgaataacgaaaatgccagattacttacttttcagacatggccattgacttttctgtcgccaacagatctggcaaaagcaggcttttactacataggacctggagacagagtggcttgctttgcctgtggtggaaaattgagcaattgggaaccgaaggataatgctatgtcagaacacctgagacattttcccaaatgcccatttatagaaaatcagcttcaagacacttcaagatacacagtttctaatctgagcatgcagacacatgcagcccgctttaaaacattctttaactggccctctagtgttctagttaatcctgagcagcttgcaagtgcgggtttttattatgtgggtaacagtgatgatgtcaaatgcttttgctgtgatggtggactcaggtgttgggaatctggagatgatccatgggttcaacatgccaagtggtttccaaggtgtgagtacttgataagaattaaaggacaggagttcatccgtcaagttcaagccagttaccctcatctacttgaacagctgctatccacatcagacagcccaggagatgaaaatgcagagtcatcaattatccattttgaacctggagaagaccattcagaagatgcaatcatgatgaatactcctgtgattaatgctgccgtggaaatgggctttagtagaagcctggtaaaacagacagttcagagaaaaatcctagcaactggagagaattatagactagtcaatgatcttgtgttagacttactcaatgcagaagatgaaataagggaagaggagagagaaagagcaactgaggaaaaagaatcaaatgatttattattaatccggaagaatagaatggcactttttcaacatttgacttgtgtaattccaatcctggatagtctactaactgccggaattattaatgaacaagaacatgatgttattaaacagaagacacagacgtctttacaagcaagagaactgattgatacgattttagtaaaaggaaatattgcagccactgtattcagaaactctctgcaagaagctgaagctgtgttatatgagcatttatttgtgcaacaggacataaaatatattcccacagaagatgtttcagatctaccagtggaagaacaattgcggagactacaagaagaaagaacatgtaaagtgtgtatggacaaagaagtgtccatagtgtttattccttgtggtcatctagtagtatgcaaagattgtgctccttctttaagaaagtgtcctatttgtaggagtacaatcaagggtacagttcgtacatttctttcatgaagaagaaccaaaacatcgtctaaactttagaattaatttattaaatgtattataactttaacttttatcctaatttggtttccttaaaatttttatttatttacaactcaaaaaacattgttttgtgtaacatatttatatatgtatctaaaccatatgaacatatattttttagaaactaagagaatgataggcttttgttcttatgaacgaaaaagaggtagcactacaaacacaatattcaatcaaaatttcagcattattgaaattgtaagtgaagtaaaacttaagatatttgagttaacctttaagaattttaaatattttggcattgtactaataccgggaacatgaagccaggtgtggtggtatgtgcctgtagtcccaggctgaggcaagagaattacttgagcccaggagtttgaatccatcctgggcagcatactgagaccctgcctttaaaaacaaacagaacaaaaacaaaacaccagggacacatttctctgtcttttttgatcagtgtcctatacatcgaaggtgtgcatatatgttgaatgacattttagggacatggtgtttttataaagaattctgtgagaaaaaatttaataaagcaacaaaaattactcttattcttcattgctttatttcaatgacattggatagtttagtcactcccagactctttccataccttcttaaagcctctcaaatattgaactacagtttatactccttcccataagatgcttcttcattgacacttgtagaacacggggtcaacacatcataaaatctattatggaatgcctgagacaagaatcaaacagtccctttagtaagtttgtttattcacttctctattgattcattcaagaagtctcatgccagccccacctattggaagaaggtctgagttttattcttatctctttggtattaattctgaaacttagaaagtacactggttagcaatgcttgggaccaacaggttgttctggtaaataaatctgtttcatattgtcagtgcaacaaaatgtccccctctgcattatgttattggtactcaacacgtccgagtcataactctgtcctttgcttcttatagaggtattaggtcttcaagagcagaagtaagactgtaatagggaatactcaggggaaggcaggcaaaggctagtcatctaaaccagttctagatgtctgtataggggcagatggctctgtaagggcagaagggaaagaccccttcataagggtcacagctgacaatcctataacaaaagacaggttaacaagagaaaaacttaacaaatttatttaatcacagatttacatcaccggggagccttcgtaatgaagatccaaaattacaggggaaactgtgcatttttatgcttaggtttgataatgaatggacagccctgaagaatagtgattggaaaaaaaggatatgatctaatgggaatagacacaggttggggacccagcaaggcctgtctgttcagattattcttggtctctgtgcagcattccttcctcctggatatagggcagggcctgtatgggatggggatattataacctgctatcaagcaaggtaggtcagagaatttatttatggccagctcttacatagttaggtgaggaaagattagagtactatctttaagatgtaagtctggcattgtggaaagatggttccagtttctatgacctaccttggggaagaggaattcaagtttctgtggcttgccttcagggagaatgaggctgagacaggagggcaggataacatcagagaaaaactttgcttctgaggccttcactttgggttttctgagccccaacatctgctagtgttgtaaagagaacaattagggaccaagtgaggggaggaaagaatccatctctgcattctgatgctgggagacttatttccttgaaatgcaattgattttgcctctgctaagaggctctgctggctacccatgtactagccagtgtcctgcatgggtgctaggctgaattatttgtaattgtgcttaggtgatttgtaactcaggtatagggtatttaaatagtaggcaccctttttgcaccatgtgtttttttttttatctagttcttgtatactacagataatatttgaactttgtcatctcactgtaaaacttttgttcatttctcattatggtaataaatagctattataaccaacccatttattcaaatatgttatttccctaagtgttattttgacattttgttttggaaaaaataaatcaccatagataataaaaaaaaaaaaaaaaaaaaaaa

SEQ ID NO: 4 - DNA, 760 bp, Homo sapiens
gaggaaccgagaggctgagactaacccagaaacatccaattctcaaactgaagctcgcactctcgcctccagcatgaaagtctctgccgcccttctgtgcctgctgctcatagcagccaccttcattccccaagggctcgctcagccagatgcaatcaatgccccagtcacctgctgttataacttcaccaataggaagatctcagtgcagaggctcgcgagctatagaagaatcaccagcagcaagtgtcccaaagaagctgtgatcttcaagaccattgtggccaaggagatctgtgctgaccccaagcagaagtgggttcaggattccatggaccacctggacaagcaaacccaaactccgaagacttgaacactcactccacaacccaagaatctgcagctaacttattttcccctagctttccccagacaccctgttttattttattataatgaattttgtttgttgatgtgaaacattatgccttaagtaatgttaattcttatttaagttattgatgttttaagtttatctttcatggtactagtgttttttagatacagagacttggggaaattgcttttcctcttgaaccacagttctacccctgggatgttttgagggtctttgcaagaatcattaatacaaagaattttttttaacattccaatgcattgctaaaatattattgtggaaatgaatattttgtaactattacaccaaataaatatatttttgtacaaaaaaaaaaaaaaa

SEQ ID NO: 5 - DNA, 1237 bp, Homo sapiens
gctgcagaggattcctgcagaggatcaagacagcacgtggacctcgcacagcctctcccacaggtaccatgaaggtctccgcggcagccctcgctgtcatcctcattgctactgccctctgcgctcctgcatctgcctccccatattcctcggacaccacaccctgctgctttgcctacattgcccgcccactgccccgtgcccacatcaaggagtatttctacaccagtggcaagtgctccaacccagcagtcgtctttgtcacccgaaagaaccgccaagtgtgtgccaacccagagaagaaatgggttcgggagtacatcaactctttggagatgagctaggatggagagtccttgaacctgaacttacacaaatttgcctgtttctgcttgctcttgtcctagcttgggaggcttcccctcactatcctaccccacccgctccttgaagggcccagattctaccacacagcagcagttacaaaaaccttccccaggctggacgtggtggctcacgcctgtaatcccagcactttgggaggccaaggtgggtggatcacttgaggtcaggagttcgagaccagcctggccaacatgatgaaaccccatctctactaaaaatacaaaaaattagccgggcgtggtagcgggcgcctgtagtcccagctactcgggaggctgaggcaggagaatggcgtgaacccgggaggcggagcttgcagtgagccgagatcgcgccactgcactccagcctgggcgacagagcgagactccgtctcaaaaaaaaaaaaaaaaaaaaaaatacaaaaattagccgggcgtggtggcccacgcctgtaatcccagctactcgggaggctaaggcaggaaaattgtttgaacccaggaggtggaggctgcagtgagctgagattgtgccacttcactccagcctgggtgacaaagtgagactccgtcacaacaacaacaacaaaaagcttccccaactaaagcctagaagagcttctgaggcgctgctttgtcaaaaggaagtctctaggttctgagctctggctttgccttggctttgccagggctctgtgaccaggaaggaagtcagcatgcctctagaggcaaggaggggaggaacactgcactcttaagcttccgccgtctcaacccctcacaggagcttactggcaaacatgaaaaatcggcttaccattaaagttctcaatgcaaccataaaaaaaaaa

SEQ ID NO: 6 - DNA, 6493 bp, Homo sapiens
agagcggagaagagcgagcaggggagagcgagaccagttttaaggggaggaccggtgcgagtgaggcagccccgaggctctgctcgcccaccacccaatcctcgcctcccttctgctccaccttctctctctgccctcacctctcccccgaaaaccccctatttagccaaaggaaggaggtcaggggaacgctctcccctccccttccaaaaaacaaaaacagaaaaacctttttccaggccggggaaagcaggagggagaggggccgccgggctggccatggagctgctgtgccacgaggtggacccggtccgcagggccgtgcgggaccgcaacctgctccgagacgaccgcgtcctgcagaacctgctcaccatcgaggagcgctaccttccgcagtgctcctacttcaagtgcgtgcagaaggacatccaaccctacatgcgcagaatggtggccacctggatgctggaggtctgtgaggaacagaagtgcgaagaagaggtcttccctctggccatgaattacctggaccgtttcttggctggggtcccgactccgaagtcccatctgcaactcctgggtgctgtctgcatgttcctggcctccaaactcaaagagaccagcccgctgaccgcggagaagctgtgcatttacaccgacaactccatcaagcctcaggagctgctggagtgggaactggtggtgctggggaagttgaagtggaacctggcagctgtcactcctcatgacttcattgagcacatcttgcgcaagctgccccagcagcgggagaagctgtctctgatccgcaagcatgctcagaccttcattgctctgtgtgccaccgactttaagtttgccatgtacccaccgtcgatgatcgcaactggaagtgtgggagcagccatctgtgggctccagcaggatgaggaagtgagctcgctcacttgtgatgccctgactgagctgctggctaagatcaccaacacagacgtggattgtctcaaagcttgccaggagcagattgaggcggtgctcctcaatagcctgcagcagtaccgtcaggaccaacgtgacggatccaagtcggaggatgaactggaccaagccagcacccctacagacgtgcgggatatcgacctgtgaggatgccagttgggccgaaagagagagacgcgtccataatctggtctcttcttctttctggttgtttttgttctttgtgttttagggtgaaacttaaaaaaaaaattctgcccccacctagatcatatttaaagatcttttagaagtgagagaaaaaggtcctacgaaaacggaataataaaaagcatttggtgcctatttgaagtacagcataagggaatcccttgtatatgcgaacagttattgtttgattatgtaaaagtaatagtaaaatgcttacaggaaaacctgcagagtagttagagaatatgtatgcctgcaatatgggaacaaattagaggagacttttttttttcatgttatgagctagcacatacacccccttgtagtataatttcaaggaactgtgtacgccatttatggcatgattagattgcaaagcaatgaactcaagaaggaattgaaataaggagggacatgatggggaaggagtacaaaacaatctctcaacatgattgaaccatttgggatggagaagcacctttgctctcagccacctgttactaagtcaggagtgtagttggatctctacattaatgtcctcttgctgtctacagtagctgctacctaaaaaaagatgttttattttgccagttggacacaggtgattggctcctgggtttcatgttctgtgacatcctgcttcttcttccaaatgcagttcattgcagacaccaccatattgctatctaatggggaaatgtagctatgggccataaccaaaactcacatgaaacggaggcagatggagaccaagggtgggatccagaatggagtcttttctgttattgtatttaaaagggtaatgtggccttggcatttcttcttagaaaaaaactaatttttggtgctgattggcatgtctggttcacagtttagcattgttataaaccattccattcgaaaagcactttgaaaaattgttcccgagcgatagatgggatggtttatgcaagtcatgctgaatactcctcccctcttctcttttgccccctcccttcctgcccccagtctgggttactcttcgcttctggtatctggcgttctttggtacacagttctggtgttcctaccaggactcaagagacaccccttcctgctgacattcccatcacaacattcctcagacaagcctgtaaactaaaatctgttaccattctgatggcacagaaggatcttaattcccatctctatacttctcctttggacatggaaagaaaagttattgctggtgcaaagatagatggctgaacatcagggtgtggcattttgttcccttttccgtttttttttttttattgttgttgttaattttattgcaaagttgtattcagcgtacttgaatttttcttcctctccacttcttagaggcattcagttagcaaagaggttggagcaacaacttttttttttttttttgcacaattgtaattgacaggtaatgaagctatttgttaaaatatttgcctttttaagtaaaaaagaaaaatcagaacagggctatttgaagaattattttatacacagattctgccttgtttcatagtatgagggttgaagacggaaaacaatctaagggtctctcatttttttaattttgttttgttcagtttggtttttttttttttttgcgctgctaagaagctaaagtcatccatccttattcacgttgacagtacctagctgtaatgtttcacagagtgtgctgctattttataaacatttttataatatattattttactgcttaaattccaagtcctgaagtagatggttgagatatgagttcttcgtactggaaaagcccttccgtagtttgttttcttctggtagcatattcatggttgtttttttttttcttttttggttttttggttttttttttttcctctgatcacattcttcaaagacggagtattctttacctcaggtttactggacaaaatcaataactacaaaaggcaatgattcacgcttttgttttcataatacctcacaaccgtacagtttctgcttgggagcccattcgcatgaggaatacagaagcagtgtgagcagggctgactccctctcaggtggaaggcagggcggtctcactcccagggacctttttggtcatggaggccatcgggctcccagttagaccctggtatcctcatcatgatggaaaaaatacattgaaccaagggatcctccctccccttcaaggcagacgttcagtacaaacatttatgcggtaggctcagatgtcgtaatttgcacttaggtaccaggtgtcaggaaacagactaaaaagaattccaccaggctgtttggagatcctcatcttggagctttttcaaaagcggggcttcatctgcaaagggccctttcatcttgaagtttttcccctccgtctttcccctcccctggcatggacaccttgtgtttaggatcatctctgcaggtttcctaggtctgaatctgcgagtagatgaacctgcagcaagcagcgtttatggtgcttccttctccctcctctgtctcaaactgcgcaggcaagcactatgcaagcccaggccctctgctgagcggtactaaacggtcgggttttcaatcacactgaattggcaggataagaaaaataggtcagataagtatgggatgatagttgaagggaggtgaagaggctgcttctctacagaggtgaaattccagatgagtcagtctcttgggaagtgtgtttagaagggttcaggactttgtgagttagcatgaccctaaaattctaggggatttctggtgggacaatgggtggtgaattctgaagttttggagagggaagtggagcagccagcaagtaagctagccagagttttctcaagagccagctttgctcagcacactctcctgggccccaaggagtcccacggaatggggaaagcgggaaccctggagttcttgggaatcttggagcctaaagagaaaccgaggtgcaaattcatttcatggtgactgacccttgagcttaaacagaagcagcaaatgaaagaaccggacaaataaggaagggcacaagcctacccgactctatttacagtctgtaactttccactcttcctgtagtcccgaggcccctgggtccttctagcttttctctttcccatccttggggccttgtgtgatgatgggtgtggggctgccgatgggaaagtcgggggttgttaggcttttctgcctgctcctgcttaaacacaagaaggaatcctggattttgccctctccttagctcttagtctctttggtaggagttttgttccagaggagctctcccccttggatttgaacttgctctttttgttgttgttgttctttctcttctttttcttacctcccactaaaggggttccaaattatcctggtctttttctaccttgttgtgtttctatctcgtctttacttccatctgtttgtttttttctccatcagtgggggccgagttgttcccccagcctgccaaattttgatccttcccctcttttggccaaatcctagggggaagaaatcctagtatgccaaaaatatatgctaagcataattaaactccatgcgggtccataacagccaagaagcctgcaggagaaagccaagggcagttccctccgcagaacaccccatgcgtgctgagaggcgagctccttgaagaaggggctgttcttccaggaggccttattttgaactgcctcaggaccccactggagagcacagcatgccttactactgggtcatccttggtctatgtgctctgtactggaggctctgttctgcctcttatcagccaggtcaggggcacacatggcttaagtgacaaagccagaggagaagacaaccctgacagcatcacgctgcatcccattgctagcaggattggcaactcttcagacggagctgcgcttccctgcagtctagcacctctagggcctctccagactgtgccctgggagctctgggactgaaaggttaagaacataaggcaggatcagatgactctctccaagagggcaggggaattttctctccatgggccacaggggacagggctgggagaagaaatagacttgcaccttatgtcatgtaaataattgattttctagttcaagaagataatattggtagtgtgggaattggaggtaggaaggggaggaagtctgagtaagccagttggcttctaagccaaaaggattcctctttgtttatctctgagacagtccaaccttgagaatagctttaaaagggaaattaatgctgagatgataaagtccccttaagccaacaaaccctctgtagctatagaatgagtgcaggtttctattggtgtggactcagagcaatttacaagagctgttcatgcagccatccatttgtgcaaaatagggtaagaagattcaagaggatatttattacttcctcataccacatggcttttgatgattctggattctaaacaacccagaatggtcatttcaggcacaacgatactacattcgtgtgtgtctgcttttaaacttggctgggctatcagaccctattctcggctcaggttttgagaagccatcagcaaatgtgtacgtgcatgctgtagctgcagcctgcatcccttcgcctgcagcctactttggggaaataaagtgccttactgactgtagccattacagtatccaatgtcttttgacaggtgcctgtccttgaaaaacaaagtttctatttttatttttaattggtttagttcttaactgctggccaactcttacatccccagcaaatcatcgggccattggattttttccattatgttcatcacccttatatcatgtacctcagatctctctctctctcctctctctcagttatgtagtttcttgtcttggacttttttttttcttttctttttctttttttttttgctttaaaacaagtgtgatgccatatcaagtccatgttattctctcacagtgtactctataagaggtgtgggtgtctgtttggtcaggatgttagaaagtgctgataagtagcatgatcagtgtatgcgaaaaggtttttaggaagtatggcaaaaatgttgtattggctatgatggtgacatgatatagtcagctgccttttaagaggtcttatctgttcagtgttaagtgatttaaaaaaataataacctgttttctgactagtttaaagatggatttgaaaatggttttgaatgcaattaggttatgctatttggacaataaactcaccttgacctaaa

SEQ ID NO: 7 - DNA, 800 bp, Homo sapiens
acacagagagaaaggctaaagttctctggaggatgtggctgcagagcctgctgctcttgggcactgtggcctgcagcatctctgcacccgcccgctcgcccagccccagcacgcagccctgggagcatgtgaatgccatccaggaggcccggcgtctcctgaacctgagtagagacactgctgctgagatgaatgaaacagtagaagtcatctcagaaatgtttgacctccaggagccgacctgcctacagacccgcctggagctgtacaagcagggcctgcggggcagcctcaccaagctcaagggccccttgaccatgatggccagccactacaagcagcactgccctccaaccccggaaacttcctgtgcaacccagattatcacctttgaaagtttcaaagagaacctgaaggactttctgcttgtcatcccctttgactgctgggagccagtccaggagtgagaccggccagatgaggctggccaagccggggagctgctctctcatgaaacaagagctagaaactcaggatggtcatcttggagggaccaaggggtgggccacagccatggtgggagtggcctggacctgccctgggccacactgaccctgatacaggcatggcagaagaatgggaatattttatactgacagaaatcagtaatatttatatatttatatttttaaaatatttatttatttatttatttaagttcatattccatatttattcaagatgttttaccgtaataattattattaaaaatatgcttctacttgaaaaaaaaaaaaaaa

SEQ ID NO: 8 - DNA, 2372 bp, Homo sapiens
agaagcgctttctttcgcgagcaccctgaaccagaccatgacccagaccctcaagtacgcctccagagtgttccatcgcgtccgctgggcgcccgagttgggcgcctccctaggctaccgagagtaccactcagcacgccggagcttggcagacatcccaggcccctctacgcccagctttctggccgaacttttctgcaagggggggctgtcgaggctacacgagctgcaggtgcagggcgccgcgcacttcgggccggtgtggctagccagctttgggacagtgcgcaccgtgtacgtggctgcccctgcactcgtcgaggagctgctgcgacaggagggaccccggcccgagcgctgcagcttctcgccctggacggagcaccgccgctgccgccagcgggcttgcggactgctcactgcggaaggcgaagaatggcaaaggctccgcagtctcctggccccgctcctcctccggcctcaagcggccgcccgctacgccggaaccctgaacaacgtagtctgcgaccttgtgcggcgtctgaggcgccagcggggacgtggcacggggccgcccgccctggttcgggacgtggcgggggaattttacaagttcggactggaaggcatcgccgcggttctgctcggctcgcgcttgggctgcctggaggctcaagtgccacccgacacggagaccttcatccgcgctgtgggctcggtgtttgtgtccacgctgttgaccatggcgatgccccactggctgcgccaccttgtgcctgggccctggggccgcctctgccgagactgggaccagatgtttgcatttgctcagaggcacgtggagcggcgagaggcagaggcagccatgaggaacggaggacagcccgagaaggacctggagtctggggcgcacctgacccacttcctgttccgggaagagttgcctgcccagtccatcctgggaaatgtgacagagttgctattggcgggagtggacacggtgtccaacacgctctcttgggctctgtatgagctctcccggcaccccgaagtccagacagcactccactcagagatcacagctgccctgagccctggctccagtgcctacccctcagccactgttctgtcccagctgcccctgctgaaggcggtggtcaaggaagtgctaagactgtaccctgtggtacctggaaattctcgtgtcccagacaaagacattcatgtgggtgactatattatccccaaaaatacgctggtcactctgtgtcactatgccacttcaagggaccctgcccagttcccagagccaaattcttttcgtccagctcgctggctgggggagggtcccaccccccacccatttgcatctcttccctttggctttggcaagcgcagctgtatggggagacgcctggcagagcttgaattgcaaatggctttggcccagatcctaacacattttgaggtgcagcctgagccaggtgcggccccagttagacccaagacccggactgtcctggtacctgaaaggagcatcaacctacagtttttggacagatagtcccatggaaagagactgtcatcatcaccctttcattcatcatagggataagattttttgtaggcacaagaccaaggtatacatcttcccctaatgcctatctgaccaaactggatagaaccaccatagtgaagtgtgaggcggccctgaccaatgtgtgaagtatgcacttggcctgactcaggaagccaggtgagaaaaccatggtctctctgcttgcttggcccttctgatcatgtatgcatcccccaaggatgaaatcagattttaactaataatgctggatggcctgaggaaagattcaactgcctctctttttgggctttcatagtgttcattgatgctgctggctaagcatttatcaaagcataagctcagtaactgtgcatctggtctgtacctggttggtccttcgtctttgcatgtaagctctttgagaggaagggtgaagccttatttgttttttatgtcccctgccagggcctgtctctgactaggtgtcaccatacacattcttagattgaatctgaaccatgtggcagaagggataagcagcttacttagtaggctctgtctacccccttccttctttgtcttgcccctaggaaggtgaatctgccctagcctggtttacggtttcttataactctcctttgctctctggccactattaagtgggtttgccccatcacttagttctcaggcagagacatctttgggcctgtccctgcccaggcctctggctttttatattgaaaatttttaaatattcacaaattttagaataaatcaaatattccattcttga

SEQ ID NO: 9 - DNA, 891 bp, Homo sapiens
agctccaaccagggcagccttcctgagaagatgcaaccaatcctgcttctgctggccttcctcctgctgcccagggcagatgcaggggagatcatcgggggacatgaggccaagccccactcccgcccctacatggcttatcttatgatctgggatcagaagtctctgaagaggtgcggtggcttcctgatacgagacgacttcgtgctgacagctgctcactgttggggaagctccataaatgtcaccttgggggcccacaatatcaaagaacaggagccgacccagcagtttatccctgtgaaaagacccatcccccatccagcctataatcctaagaacttctccaacgacatcatgctactgcagctggagagaaaggccaagcggaccagagctgtgcagcccctcaggctacctagcaacaaggcccaggtgaagccagggcagacatgcagtgtggccggctgggggcagacggcccccctgggaaaacactcacacacactacaagaggtgaagatgacagtgcaggaagatcgaaagtgcgaatctgacttacgccattattacgacagtaccattgagttgtgcgtgggggacccagagattaaaaagacttcctttaagggggactctggaggccctcttgtgtgtaacaaggtggcccagggcattgtctcctatggacgaaacaatggcatgcctccacgagcctgcaccaaagtctcaagctttgtacactggataaagaaaaccatgaaacgctactaactacaggaagcaaactaagcccccgctgtaatgaaacaccttctctggagccaagtccagatttacactgggagaggtgccagcaactgaataaatacctcttagctgagtggaaaa

SEQ ID NO: 10 - DNA, 1293908 bp, Homo sapiens
cagctccaaatgcactgattaaagacagacgtccattttctctggaaatgtatttttatgttcttactggatgtatttgctgttaatgtttgctactatgaagatacctgaacagtgtccacattagagaataagagaaagtaatgggcagattaaccctgtgcatctagacccgggaatcctttgaccctaccctccctgaaatggagacacagaggatggatgagaaaaactgagcagtgcacccatgatcacaaaaagaatgacatggaaatgtgcctcttcccatctcatgaaacgcagctcatcctctgttctttcaggcccttggtgaagagccaccccatgtctgtcccttcctcagtgtccacaccatgaggtctgcactgatctgggcttcccttctcatcactctcagtattagtgtgcattgtgaatcaggtccagctgtggctgctctgcatggggctgcagtcagtacgtttcctctgtgttcatgtaagtcctgttgaagcttactgatggagtcagagggggaaacattgtacagcccagcggttctcacagactctcctgcaaagcctctgatttcacttgtactggctacagcatgagcttggtccagcaggcttcatgacagggatttgtgtgggtggcaacagtgagttatcagggttactctccatgagtacaagtaaattaacagtcccaagcaacaccctttcaagtgcagtctaccttaaaatgaccaatgtgaaagccaaggacaagaccttgtattactgtgagtgacataggagcaggaacatctgcgtgagcccagacacaaaatcctctgcagggagacaggagggaatcgcatggtagatgctgattggaactaccatgggtcgctcagaactaccaggaggtactcagaaccactagggggcgctcaggacaccaggggacgctcaggacaaccagggggtgttcaggacaccagggggtgctccgagccaccagggggcactcaggacaccaggggacgctcagaaccattacttccttgtaaatccatgatttctttacaaatgttacttccaaaacattaacttagaaccgggaatttttttttttttgacaaagtctccctcttgtcgcacaggctggagtgcagtggcatgatcttggctcatggcaacctccaactcccgggttcaagcaattctcctgcctcatacttctgagtagctgccaccacgtgcctgccaccatgcctggctaatgtttgtacttttagtagagacggggtttcaccatgttgaccaggctagtctcgaattcatgacctcaggtgatctgccccgctaggcttcccaaagtgctgggattacaggcgtgagccaccatgcccagcctatttgaagttttaatgctgcgtgttttctgagtaacgctagcaatgatctgtcagaacaatttttaaaataggttatttatatattttattaaaatactattattaaaagagtaaaattgtaaaaattgcacctgcaatctcagcactttgggaggttgaggcaggcagatcacttgagctcaggagttttagaacagcctggcaacacaatgaaatcctttctatacaaaaaaaatagctgggtgtgatgctgcctgtggtcccagatacttggaaggctgaggtggggggatcccttaatcctgggaggttgaggctgtagtgagatgtgattgtaccactgcactccagcctggttgacagagtgagaccctgtcttaaaaaatgtgtatcctcgatacacattgtttccatgaatagagtttagtgtttttgtgctgtgatactcaaacaattatatatgttttctaacattaactcaccatatgcatggtgttttgtttctttttctttcatcagctgaaagtggaatggaaattaaacaccactttaaaggctcttgttctccactttggttggctcctggtgtcctgtttttcagactatttctccatcttcccttttactttaaaagtcttttatcttcctcagtcaccatgcaggaaataaaaattccctttactttctgtcctccaagtctggtgaacagtttccttctcttcataataactgaagccaaccaagtttaggaggataacagttctccttagaatatgctcatctacctgcagactctctgccctcctcacccttttctaaggtcctgcagacatcaccctcattccattccctcccttccctaagtacgacagagtgggctctgcagctcctgctgccttctgtgtgctcagccctggggctccctagtgcttttgttgcaggacgatcaaagatgggagagaccaaacagagttcaggagagtcctttattaaaaggtgatcacctggctcagttggactagcatccaggaaagtctgagccctggacaaagaaagcagccaccttttacacagtcagtggctgggagctacatgatgcaggaagcgtaattacagaagagagaacaaaggcagttatttgttacttcatgtcttacatccttgggaatacatggttctgtaacatatacttaacaatcttatgaccttgcagctgtgctggggaggtaagcaagaaccctctgagcctcaaggaatgtgaaaccaatgagaacagataaggctcactgagcacagaaggaaaaacaggcagttagtattctctaacttagactacgggggaggggctacacactacagtaagccctgaggggaaagttaattttctggctttacatattgtaaaattcataaattacttcttcactttgatgatgaagcccaaatccccatgtgcttacactctctcagaccaccctctaggaagctgccattgtgagtgagccctaaaaagcatgggctgggtttagcttcatattgctggatgttctctattataaaggcatgttggcaaataaagactacagtttgtattgaatattcatgccaaagaagtttttttcaaaacttttcaagtaaaaaattttatcttgcctagtttgaaaattaccatctaaattcaacaaataaggtaatacagttttaaaagtgatgtttgtcttattagttattcaatttattaacaacagactgatatttaaaataaataccattgcacatttaagtgccatactgttctgggattttttaaggaatcagagagaccgactctgttcaggaggatatttattatttaggttcaggaggatatttattatttaggtgcaccggccaagtcgaattaacatccaaaggactgagcccagaacagagttcagttaccttttaagcattttgtggggtgggagaggggacatctgtgcagggtgaagcatactacagaagtgagaaacaaagacagttattcaattgaaacatgtattacatcatttcttccttttcaaggaaaaacatgttttgcgacttgagtttatctttctagtgaccttgcagctacactgctagggaatcagggtcttcaaaatgcctgagaagggaggagaggtaaggctcattagccacagaaaaacaggcagttagtattttaaaggactccagctctttctctttttcagggagaattgggttttcttacatacaactgagtttctgcttacacattctttaatttcttttaattcctgtttcaatacttgacaagaatggcatttacatacagttttaccaaaacatgtatttaaatatatttgtctttttaatattggaataggcagacatacacgtagatcagcattattttgtactaaaatctcaaactgcaaacacaatttaaattcaattaaataattagaataatatgaaacaaatgggtgtgttgttttggtgtttacgtatgcattcacttttgcatgggcacatgtatgagtctttgctgggctgttgtgcacgtatgtgtgtttgtatgaccaggaggttttcaaatacatcattaaattacatagttatattaatcttggcaaggcacttgtattctgttttctttaattctgtttgcagaaagtagacacatattcagtcttagttccagtgtagggagtgcttttcatgagaaaaataccagaaaaaagggcaaacatggggcccactaatgtaaaaattagccacaatgtgtatgtgtgtgtgtgtgtgtgtgtgtgtgtgtctgagttgaatagtagagttggagtgggcttctatccacatgcacctgcgcctacaggtattatcaggtacaataatcaactgcagaaccctaaaggaaataagagtccccccaaacccctgaagagtgtttgggttcaccatgtgtccaatgattcagtgcctctcgagctccaggaaacggctccctggtgatgcgtgagatcttttcttggggtgtccctgcagagttcgctgggtttcctaaggctgattcactatttcaaaagatggtgtgagaagcatatggtgtaaataaagcagaattctgagccagggcacagccactttatactgggctagagacactggtaggaatatactctgtcagctcagatagaaacctccctgcagggtgggggcagggctgcagggggcgctcaggacacatcgagcacagtcttccgccccagagcaggtgcacatgaggctggggagaggttcctctcagggcctgggacttcctttaaaaatatctaaaataagtatttcacaaggactgctgatgtttgtataaatatcctattcaattgtgagcatttatcaaactggatgttgtaatgagaaccacttttataatggcgatttcaaactctgctagttatcttaataatagcagctggaggtcaggaagagattattacttataaataagtgcaatttttggagagacacactcattcccaaaataacgcattcacatattaaggtctagaaatggttcacgttgcccctgagacattcaaatgtgggttcaaagtgaggtgctgtcctcggggagttgttccccagtggaggaagctctgtcaacacagagttcagggatgggtaggggatgcatggcctctaacaggattacgactcgaaccctcagcttctacaattgtgtcgtccgtgtgtcatggattttctctttctcatactgggtcaggaattggtctattaaatagcatccttcatgaatatgcaaataactgaggggaatatagtatctctgtaccctgaaagcatcacccaacaacaacatccctccttgggagaatcccctagagcacagctcctcaccatggactggacctggagcatcctcttcttggtggcagcagcaacaggtaaggggctccccagtctcagggctgaggaagaaaccaggccactcaagtgaggctttacccacccctgtgtcctctccacaggtacctactcccaggtgcagctggtgcagtctggccatgaggtgaagcagcctggggcctcagtgaaggtctcctgcaaggcttctggttacagtttcaccacctatggtatgaattgggtgccacaggcccctggacaagggcttgagtggatgggatggttcaacacctacactgggaacccaacatatgcccagggcttcacaggacggtttgtcttctccatggacacctctgccagcacagcatacctgcagatcagcagcctaaaggctgaggacatggccatgtattactgtgcgagatacaccatgtggaaacccacatcctgagagtgtcagaaatcctgatgtgggaggcagctgtgctgagctgaggcagtgatgcagcagtttccttaacttccatcttatctcattttgcatcgacatccacctttatattagccaagaatgtggaatagacgggtgctcataagagatccttaacttgcccattttaatgggttttccagaagatgtgagaagccactttgttagcaaaacatgccaaagccatgccctgctccagacacatgtgagcccatttcctgctctttgcttaactgacaagctctcatcagtgcacctgggctaatttcacatcaggtacaggaatatgttctaaaggaaagctaattttataatagcaattcctgcttaataaccttcagcttcattgtttttgtgtaatctatcaacaaattatgttagttcaaggttctcaatgggagtttctaataaatagaagggatgtatagaagttcccctaattaaaacaattgtgaacacaatcttggtattcagctgtgtctccacccttcttaccattcaccacaaagtaattctcacttctggaagctgggttcattttcaaattagttttttttttcattttaatatctcaaggttattgtatgtgactattttagcagaaattgaattttgggaaattgaactaaccaactgaaaataaattcacaactaaataacaagatgccagaatataattggctccaggctttgttaattcagcagtttatctacctaggcattatatttacacatcttcatgctatttttacagtcaactcccattatgtaagaaatggtcatacaccatttcttacatatggtaagatatctacgatggatattcagaactacgataaacattggatgcatccaggtttgtctgaactcactgagattattacactcagctgctgtttcaatgtgtctgaaggtataaatgacaattcgaatgacttgggtgtgtggatggttttacatgagtctttaagtgtagaacaatattgaccctgttccaaaatctgtccttgatccatgatcacactcatctcccagaacagctccttcaacacatttcctatctggatgaagaggactctgtgcttggtgaggggaggccacaggtagagaactgagttctcagagggcacagccagcatcctcctcccagggtgaacccgaaagactgcggcctccctcatcccttttcatctctccatacaaaggcaccacccacatgcaaatcctcacttaagcgcccacaggaaaccaccacacatttccttaaattcggcgttctgcttacacgggaaatgctttctgagagtcatggacctcgtgtgaaaagaacatgaaaaacctgtggttcttcctccccctggtggcagctcccagaagtgagtgtctccaggatgcagatatgaagatatgggaggctgcatctgagcccagggctcacagtgggtctctgtgttcacaggggtcctgtcccaggtgcagctgcaggagtggggcccaggactggtgaagccttcggagaccctgtccctcacatgcgctgtctctggtgactccatcagcagtggtaactggtggagctgggtccgccagtccccagggaaggggctggaatggattggatacatctattatagtgggaggagctactacaccccgtccctcaggagttgagtcaccatgtcaatagaaacgtccaagaaccagttttccctgaagctgagctctgtgaccgcagggaggcggagggggcgggcgcaggtgccgctcaggaccagcagggggcgcgcggggcccacagagcatgaggccgggtcaggagcaggtgcagggagggcggggcttcctcatctgctcagggctctccctcctcgccagcacctcagctgtctccagggctcctctttctttcttatctgtggttctgcttcctcacatccttgtggcaggcaagaaaggaggacgacaggcctggtgcggtggtgtatgcctgtaatccccgcactttgggaggccgaggcgggtggatcacctgacgtctggagttcgagaccagcctgaccaacatggagaaaccccgtctctactaaaagtacaaaattagccaggcgtggtggcgcatgcctgtaatcccagctactccggaggctgaggcaggagaacggcttgaacctggggggcggaggttgctgtgagccgagatcgtgccattgcactccagcctgggcaacaagagcaaaactccgtctaaaaaaaaataaaaggaagaagacaaattttcctcttacagtcgaagtatcaacaatactaggaactttcctacgagttcctgaatggccccttttttccttcttgattaaaaaaaagttctaatgcttctcaccatctctttatttgtgtcgtcaattgaattgtgccctctttgaaattcatatactgaaatcttgaatccagtggatctatattggaattttaagtatataattaaggttaaatgtggtcatacgtgtgagaccctaaagcaatagacatgttgtctttataagaagaggaagagacaccagagacctctcacttttcacgtgcacatagaaaggaggccatgtggacacacagtggactagaaggtggccctgggcaagccaggaagaagccgcaccaagaaccaccctgccagcaccgtgatcttggacattcagactgcagaattgtaagaaagtcagtatttgttgtttatgccacccactcctgttgtcttcttgtgaagacccacacagactaatactacataactctgttagctttgtctcctagaaggagaagcaggcccctgaggctgggcacatctcagatttccatataaagtaggcaaaaatagtaactcttataaaaaaatgtgtcaaggccctttctttcttttttttctttgagacagagtctcgctctgtcaccaggctggagtgcagtggcacgatctcggctcactacaacctccacctccagggttcaagtgattctccttcctcagcctcccaagtacctgggactacaggcacccgccaccaaccctggctaattttttgtatttttagtagagatggggtttcaccatgttagcaaggatggtctcgatctcctgacctcgtgatcctcccgcctcacctcccaaagtgctgggattacaggtgtgagccaccattggccatttttggtggaaaggtctctgaaaccaaccctggtgtctgtgccacaaaagttgtcttttatcttttatttggacataacaaatggacagtgagtaccacctggatggagactgaccactgaccatcttctgctgtctcctaagtatgtcaaagaaaaccacatcgacatcactatttttcttcaacctcctcgaatgaactatagaaatgatccctgaaagtatagtctattccttcaaccttctaaatttgcactaaatctcttcctaaatgaggagctacagggggtctgagttttattcccttctttccagttttccccaagtacaaagagcagaatagactttcagtgaaatttggctgacaatgcccctaacaccacatcactttctaaaacccatatcctgcctccatccttctctggacacccctcatcgggctacccaggaatggccagaagctggcatcagcttctgggctgaggccacgagctatacacacatgtgatttcagttacacagactctactgcaggaccacacctgtgttctgaggcactcaggcacctgctgatctcagtcattctctaataaattacacacctcttattaataaaggtccaaatggtcccatcagctgcagagcagtggagtaaagctcatgggtgggtccgtcaggcagaagtcagacaatgggatgggtaggttggtcacctccattgtcactgaggttcccagtggattttaacagaataaaacaatattaacaacaaagggatcttgaaagtatttaaggtccaggaattttgtttggggggctagagaaagacatttttaaacagaaagccctaaagcacatacagcagctgacagagtggccactgtgcacatgacggctgaggagacagatggtaggggacattcccccaagatgtccctgggtgtgtgatggttggactcctcatgcatatgaaaataagagctggactcaggtagaaacaagggccataccccataggaaaggaagaaaaaaacagatgggcaaccctggagagagctcattagatttggtaggtttgagatgaaaattacttccatggattttaatgttctaagctaagtaagaatctcttcaataaagtgagaattaaaaggagaatggagctaggagttgagagaggcaacaaataatgagagagcagaaagcaaatccacaaaaaactgtcacatgacagaggccagaatggagctgatgcagctgcgtcatttcctacagacctagttgaccatgtggagaagaggcttgaacaaatggggacgttctccaaccttccaaatcagccttcttcttaggcttgagtagtaatcatggttctgagggtgaccttccaaattttcctgtctgtacctcttccaccaggggtagagtgtcttcccaaccataatggtttctctccagtgtcctcagcttctcctcctttgtacttaccctgcagattaaggatttcttctagatggagtttcctgggaatcctctgttttcttttgtttctgttgactccaccacaccccataggtcacaggtttgattggatttcccctggagacagtggaggtggatccaggcgttcaacagtcctcgctgttcttcccttcctgtcagcaccacaggacagcagataagggagttgactgtggatttttcaaattcctgggaaaagcctgcaaggactagtagattcacactctaataccattagcacatgcatccaaaaaaaatcctcactaaatatttccaggttagcctgttcctctctcaatgccatccagtggcacctgccctgggttcactaacatgtgggccccagtcctctctgcaggcctctctctcctcacatttcagtcttcttgctttctctgtgaaactaactcacaaatgttacaggtttttcttcttcctttattcacagtttttcaggtttgttgttaatgaggacagaataagatcatagtttcctcatttttcacattcccacactgagtagatttctatataaaagccagaaactaagagaacaaatcaaatatccatatccattacaggtgaatgttaaacaatttgacataagattatgaagtaaagtacaatgcagcattagaatcaaggcatcctcattcacataaagtcatggctacattcacaaataactgcgctgagtggaagtagctaaagtattaacagtgcacttcataaacttctatttgtataaactgtagaaggtaaaactattctaaagtaacagagaagagaatttggtgagaattgggtgttgaaagtaatggggtgttgagatgaaattacagagaagtgacagaaagatttagaggttaacttaattgcacacgacttaattgaaaccctgattaaagggttgcacacatacattaacatattccaaattgtgcagtatatatttgaattaattatttgttaattttgtacttaaaaaagcagtaacaaagaaacaaatgaatgtgttggttgaggaggagcaaaaaatagatggctattaacacttgaaacatcgctgacttttgaaagtacacatgtatgaacactggttctctctatatatatttcagataaacaacagaatacactaaaagaaaacagagatatcctggcaggggtggaatcctgcaaacctcactaggcatgtcccacactgccctggagttgtctcaggggagcagtcttctctagtggtcagaggcacaggcatggataatgggactaattctgtccagctgtgtgatcttgaccatattgtacagccactctgttctgtgtgtaatgtaaattccttaaaatgtaacattgacacttgcattaaatgtattctgcaaatatgtagaaatgaaataagatgatgactgctaaatagttatcaaggcatgatcacataatataaaatgatattttcctgagtgataagatgactaccaatctcccccaaggcactttgtctgctctgacccctgcccctcctcaggattcccatcccagagcttgctatacagtaggagacatgcaaacaggtttctccctttgttgatgaaaaccagcccagtcctgaccccgtaggtttgggagagaagccccagccctgggattcccaggggtttccgttttgtgatcaggactaaagacagaggacccatcatggagtctgggctgagctgggtttcacagttgttattttaaaaggtaaaccagagaaatagagtgtgagtgaatatatttgagagaaacagtggatatgtcaggcagtttctcaccaggatctctacgagtttacgggtgtccagtgtgaggtacagctggtggagtctggagaggacccaagacaacctggggttccctgagactctcctgtgcagcctctggattaaccttcagtagctactgaatgagctcggtttcccaggctccagggaaggggctggagtgagtagtagatatacagtgtgatggaagtcagatatgttatgcacaatctgtgacgagcagattcaccgtctccaaagaaaatgccaagaactcactgtatttgcaaatgaacagtctgagagcagagggcacagctgtgtgttactgtatgtgaggcaccaggtaagaagacatcagtgtgaacacagacacagaggttcctgtaatgataagggaggaggctgggataaagggagcactcaagacccacagaaaacaggggaagctctagggcaggtgcagacggtcgtcatgggctactttccttcagggtctgtggctttctctgcatccaacagttcccctgggagcctcttgacatttatgtttctgtgcccatccctgaggtctctggattagaaaaatttattataagaagtggaaacattctcatttgtcccaaaggcagatgtaagtaatggaggcataaaaatgcacaggaggccagggaggctgtagacactgccaccccagaatgtcaatctcaccactagtgctggagaagagtgggagtttgatggagcttacctaaataccctgggtccaagctaagttcagcgaggccactggtgcctcccagagctcagttgtccatcaggaatctcccatgtgtcccagcagcagccatgcctcagtacttccgctgtgcacagccattgtctgggaggagctcccaggttgggtgtctttggcacacaccaggtgacaggtgttagagtgcagtgcagcagctggctgcctggtctattgggctccctgatgttggagagatgggaggtggattctcagggccagcacccagtttgtgaatttttatataaaaaccatgattttacttcattttctcagatgacatagataattaagaacagagtctggtccggacgtggtggctgatgcctgtaatcccagcactttgggaggccaaggcgggcagatcacctgaggtcgagagttcgagaccagcctgaccaatatggaaaaatccatgtctactaacaatacaaaattagccaggcatggtagcatatgcctgtaatcccagctactagggaggctgaggcaggagaatcgcttgaacccgggaggtgaaggttatggtgagccaagatcacaccattacactccagcctgggcaacaagagtgagactccatcaaaaaaaaaaaacaacaaaaaaaaaacagactttgcaaaataatgttcaaccttatcccaaattcattgtttcttaattctgtgcagcatccagacatattattaccttcctcatgatgaattgttctgtttaaactgagatcagttttttctcatattctttggtttctgtctaagaacagagatcttgattacagtaaggttggttctttcctcatactaaccctcacctcccccagagaaagagcagagattgtcctcactctgagtctgagggaggagctgttcctgtacaactcagagcctgcagagacccccaggtgcagcttcagtgagtcagacatttctccatgtgggtgacctccactgccagtgattgctgctgaggtctaattgtgggttaataattaggacacccttcaggttgtcacatcccaatcctattctgaacatcaccattatcatagacagagatagttcaatgcccattctactgacataagtttctctttataatttggttccaactatggagaaaaacgtgaccctatatttgtctgaatctaacctcagaatctgctgcattgctctaggagattcacaaattgaacacaagtgagctgtttattctcataaaaatgtacatatttgagaatttcaatgtattgcccagaacctgtgcatgccaacaactgtgtttctcagcgcactcttggcctggtgaagccctcacagaccctctcccttacctgcgctgtgtctgtgttccccatgataacgaggtcttcctgctgaagctggatccatcagccccccagggaagggaatggagtggattgggtgcataggtcatgaagggagcacacattaccacccactcctcaagtgtccagtcaccatccccagatccgtgtccaaaaaagcagttcttcctacagctgagctacatgagcaacaagcacatagccatgtatttttaagccaaagacacagtgagggaatcacagtgtgagctcacacccaaacctccctgtgggggtgcataggacagaaggggttgctcaggtccccagggggctctcaggacaccaaggggcactcaagaccattgtagaggcacgcaggtcagccgggggctctcaggaaccatcgaggaaaatcaggacaccagagggtgctcggtacagcagggggctcaggaccattgtgaggactcagaaagagcaggttcaaggctcagccttagggcaggtgaagctgggatgaaaaggggctggatgaggggttttgtgtcaccatcatatttcaccactagacaccctccactacatctgttctaatgcatgttctaacacatgtgagtgtttgtatgactagaaaatgatattttggggccaggtgcagtgactcatgcctgtaatcccagcactttgggaggctgaggcgggcagatcacctgaggtcaggagttcaagactagcctggccaacatgatgaaactccgtttctactaaaaatacaaatattagccaggcccagtggcacacgcctgtaatcccagctactcgggaggctgaggcaggagaatcgcttgaacctgggaggcagaggttgcgttgagccaagatgtgccactgcactccagcctgggcaacagagcgagactccattaaaaaaaagagagaaaaaaagaaaatgatatttatatcaatatataaccatagctaggtgtgtcaagttgtcctctccatctatgtcagccttgtccataaggactaattccctgtaatttcttgaggacctcataaactgtggtcaattatgtaatattcctctcttttttctgccttccttcctgccttctctctctcacacagaaactgacgtacacccaccccacaacacacataaatctataccttttattacctgatgtatttaataaacttgattaatgtgcagcttttcaagcttagttgcttgtgaggttgtaagaataagaaccattttttcaaagggaatgcttccagtttttgcccattcagtatgatattggctgtgggtttgtcatagatagctcttattattttgaaatacgtcccatcgatacttaatttattgagagtttttagcatgaagggttgttgaattttgtcaaaggctttttctgcatctattgagataatcatgtggtttttgtctttggctttgtttatatgctggattacatttattgatttgcgtatattgaaccagccttgcatcccagggatgaagcccacttgatcatggtggataagctttttgatgtgctgctggattcgttttgccagtattttattgaggttttttgcatcaatgttcatctgacaaagggctaatatccagaatctacaatgaactccaacaaatctacaagaaaaaaaaaacaaccccatcaaaaagtgggcgaaggacatgaacagacacttctcaaaagaagacatttatgcagccaaaaaacacatgaaaaaatgctcatcatcactggccatcagagaaatgcaaatcaaaaccacaatgagataccatctcacaccagttagaatggcaatcattaaaaagttaggaaacaacaggtgctggagaggatgtggagaaataggaacatttttacactgttggtgggactgtaaactagttcaaccattatggaagtcagtgtggcaattcctcagggatctggaactggaaataccatttgacccagccatcccattactgggtatatacccaaaggactataaatcatgctgctataaagacacatgcacacgtatgtttattgcggcattattcacaatagcaaagacttggaaccaacccaaatgtccaaaaatgatagactggattaagaaaatgtggcacatatacaccatggaatactatgcagccataaaaaatgatgagttcatgtcctttgtagggacatgggtgaaattggaaatcatcattctcagtaaactatcgcaagaacaaaaaaccaaacaccgcatattctccctcataggtgggaattgaacaatgagatcacatggacacaggaaggggaatatcacactctggggactgttgtggggtggggggaggggggagagatagcatcgggagatatacctaatgctagatgacgagttagtgggtgcagcacaccagcatggcacatgtatacatatgtaactaacctgcacaatgtgcacatgtaccctaaaacttaaagtataataaacaaaaaaagaaaggtgagggagatactgtgagtaaagagctcgcttggggtctgcaatgtagtatggcttagtcagtgtgttagtgctctgtcctcttctttctgaaatcacagttcaccatcacctccttattttctagaaacacctggaaatagtgaaacttttttacttcccttatatttcatattagtgctatacccagggatcatcagttaaccacaatgacagtgacaaaaagctgccttcatattttctcccaggagaattttggctccaagaatcaaggctttaataggattcaggagaagtcagtgatcacagggcagatgcctcaggtttaaagtcacatcaaaccgagtgtgaaccttctgtaactcgcaactgtgctaacttttggaggtttcttgaaaaattctagtcagtttgggttaaagaatggtttcagtaatgtcacactcagggtcatgactgctcaactggtcattagccctgggaagtaacttccgctaacattggcttacctcataggagcttataaattgccatcatattgattatctcattaggtcatcaggatcctgaagaatgatcttttaagaaaacaatctttttatcaggcttatttatcattgcttctatatgctgctcttgtcctgcagaggaggcagcctggggtcaatcaagatactgggtatttgggttcatactttaagccccccactctctcatggtctaacttcagacaagtcacctctgctttttgagcttcacttttctcagccaccaaatggatgtagagataatatttgcttgcccaattttgaaatgtaggacggggcatcattaattaattagttcttttgtccacaaacatttacccagctccagcatgagcccagcctatgcttggtcttctgcagaacagagaaatgccttagaaggagattctgactctagtcatccacgctgtagttaaagaactgtgagctgggagggtggggcaggcgagggggccttctgatatttatgtctcatctttccctgaaaaaatactgtgtttctactttgctgcttgtattcattcccaacctattactgttcataaaatgcataaggtttactttgactccaagtttatttttattaattaaaatattccatgtttatcataatgagggtgattctcattaaaactcttttcattgccttcctgactaaaagcaagtacatttttattttaataaacataagtaacacaataaaaaaaaaagaaccatgtgtttcccagctgtgtacctctctaagctgagtagcatcagcttataatacccagcatgaaaaacaactcaaatgtcagtcatcagcttaattggtaaagaaattgaggaaaactcatccattggcatattacccactactacaagcaactaatgttggctactgtcaacagcatggcaaaattcacaagtagttctcataagtaaaatgagccaaacaaataaaagtacttacataagatacaacttttataaatttcataaaatgaaaagtaatctaaacttacacaaaaatcagtagctcactgtgaatattgtaggaaaagggaaggtctaggaaggagaaattacagaacaagagaaaattttaaggaaattgacttgttatctacgttgataatgattatgtttgggacaatattagtaaaattgaacacttcataaagatattttttaatttaacctaattaaagatagcactaattataacatgtataatttggtagaaaaggagttagacagagataaataaaatacatgaaatgtcagagacacctgaaatacacagcaacgagccctaggcatctctgtatttttagagaaacattagaatacagcaaaataatggactaattctacgacattaagaaagtttatcaaacccaccaggcatgttgtattagttcattttcacactcctataaagaactacgtgagactgggtagtttatgaaaaaagaggtttagttgactcacagttctgcacagctggggaagtcacaggaaacttacaatcatggtggaaggtgaaggggaagcaaggcacgtctcagatggcagcaggtgagagagagagagagagaagtgacatacacttttaaaccctcaggtcttgtgagaactcactatcatgagaacaacatggggaagctgcccccgtgatccaatcacctctcacttggtccctcccttgacatgtggggattacaatttgagatgatatttaggtggggacacaaagccaatgcatatcatatgtccagctctatcctggagttgtttcaggaatccagtgtgtcctgttgatagaaaccgtgacactgagctcacagcatcagtagtatttgacaccatgcaaagtcaagagatctcaactgagatttagtgtggatgttttgtctgatgaagtcgtacactcagagcaagtgaatatggagaggtttattatctgcactgtagaggtgtctgctgagagcagggcagttctctcaggactgtctaaaatggcttggtaaaggaggaatggagactgactcagggtttttataatggtttggtggtgggggcagagtgaggcttcccactcacagaaaggggtttatagggtttgaaactcccaatggcatcacatgaagaagctcctgtgattgcaaactagattcaccttgtttgacaaaagaggagatgatagaggagtgagccttaagtcctcagcagtcatgcatcaaaaatattgtgacaacttattctatgtagcaagaataaaaataatgaataagcaaaaagataagggttcaatgcaggtggacaacatggaggtctacaggaatgcaatgactttataaatataagcaaataatattgagaaaaaggaggaggggttggggaattagagaggggtcctggtctaatgtcttgggtagaagcttctcacaacaaaggactatcagcttattctgcaggtcttaggccagctatctgcttaaaaacatccaaaaccccagagaatctataaggatgctcagtttaatatctcctatttgagtagctttacagttgtgtggaattctttattgattcttttttatttgtttttagagacaggctctcaccctgttgcacagtttgaagaacagttgtatgatcaaagctcactgtaattttgaacacctggctcacataatcttcccatctttgcttcctgagtatctagaagtagaggggaacgccacccctcacctgcttattctttaaaatattttttcagagaaataacatctctttatgttgctcaggttggcttcgattgcctcgtctcacgggatttccctcatttttgcttctgaaagtggtgtgattatagcgatgatccactgcatctggcctgaatttattctttagttgtaaaacatgaacccaacaattaactgcctgaatattttctgcagcgagttagttaaaagtatctgataagattccttccaatatgattcaagaggagtattttctgctgatgttccttccaatttccttgctgaagatcacaagagtctgtggaaaagatgtaacaaaaaggcagcctcaaactcttcatgattggagtggatatcacacaggaatcactttcagtattttgtaacacatgcatgcaataggacaaagatgatctctgggggtaaactctataaacgtatgggccttttagctgccaagtcatagggtaataactgatgcaccctgaggagtggaacatgattccatagtgctagtgggagaacctttggccaagggagttttacattttattaaagatttgatcatttttatgtagagatgccatttttaaaacattcctagaagattgttgagtaggattcattctgtcttatatgaacaatgataatgctctccatggttagataatattataaactagattgagctagagcgtttggtgtatttaatcactttttttagcttccattagcatttggattaaatgaaaatcataacaaacagtctctcagaccacagtgcgatcaaattagaactcagaattaagaaactcattcaaaaccacacaactacatggaaactgaacaacctgcttctgaatgactactgggtaaataatgaaattaaggcagaaataaacaagttctttgaaaccaatgagaacaaagacacaacataccagaatctctcggacacagctaaagcagtgtttagagggaaacttataggactaaatgctcatgagagaaagcaagaaagatctgaaatcgacaccctaacatcacagttaatagaactagagaagcaagagcaaaccaattcaaaaactagcagaagacaagaaataacgaagatcagagcagaactgaaggagatagagacaggaaaaacccttcaaaaatcaatgaatccaggagatagttttttgaaaagattaacaaaatagatagactgctagccatactaataaagaagaaatgagagaagaatcaaatggacacaataaaaaaatgataaagaggacatcaccactgatcccactgaaatacaaactaccatcagggaatactataaacacctctatgcatataaactagaaaatctagaagaaatggataaatttttggacacatacaccctcccaagactaaaccaggaagaaatagaatccctgaatagatgaataacaagttctgaaattaagtcagtaattaataatagcctactaataatattattaatagtaattaataatagccaactaaaaaaagaccactaccaggtggattcacagctgaattctaccaggggtacaaagaggagctggtaccattcctcctgaaactattcctaacaatagaaaaagagggactcctccctaactcattttatgaggccagcatcaccctgataccaaaacctgtcagagacacaacaaaaaaagaaaatttcaggccaatatccctgaagaacatcgatgcaaaaatcctcaataaaatactggcaaaccgaacccagaagcacatcaaaaagctcatccaacaggatcaagtcggcttcatccctgggatacaagggtggtttgacatatgcaaaacaataaacataatccatcacgtaaacagaaccaatgacaaaaaccacatgattatctcaatagatgcagaaaaggcctttgataaaatccaacaccacttcatgctaaaacctctgaataaaccaggtattgatggaaagtatctcaaaataataagagctatttatgacaaacccacagccaatatcatactgaacaggcaaaagctggaagcattccctttgaaaactggcacaagacaagggtgctctctctcaccactcctattcaacatagtattggaagttctggccagggcaatcaggcaagagaaagaaataaagggtactcaaaataggaaaagaggaagtcatattgtctctgtttgcagatgacatgattttatatttagaaaaccccatcgtctcagcccaaaaactccttaagctgataagcaacttcagcaaagtcccaggatataaagtcaatgtgcaaaaatcacaagcattcctatacaccaataatagacaaaaagagagccaaatcatgagtgaactcccattcaaaattgctacaaagagaataaaatacctgggaatacaacttacaagggatgtgaagaaccccttcaaggagaactacaaaccactgctcaacaaaataagagaggacatgaacaaatggaaaaacattccatgctcatgaataggaagaatcaatattgccaaatggccatacggcccaaagtaatttatagattcaatgctattcccatcaagctaccattgacttccttcacagaattaggaaaagctacttaaatttcatatgggaccaaaaaagatcccgtatagccaagacaatcctgagcaaaaagaacaaaactggaggcatcacgctacctgacttcaaactatactacaaggctacagtaaccaaaacagcatggtacttgtaccaaaacagacatatagaccaatagaacagaacagaggcctcagaaataacatcacacagctacaaccatctgatctttgaaaaacctgacaaaaacagcaatggggaaaggattccctattttataaacagtgctgggaaaactggctagccatatgtagaaagttaaaactggatcccttccttagaccttatataaaaattaactcaagatggattaaagacttaaacataagacctaaaaccatacaaaccctagaagaaaacctaggcagtaccattcaggacataggcatgggcaaagacttcatgactaaaacatcaaaggcaatggcaacaaaagccaaaattgacaaatgggatctaattaaactaaggagcttctgcacagcaaaagaaactaccatcagagtgaacaggcaacctacagactgggagaatgtttgtgcaatctatctatctgacaaaagggctaatatccagaatctacaaagaacttaaatttacaaggaaaagacaaacaatcccatcaaaaagtgggcgaaacatatgaacacttgcttctcaaaagaagacacatgaaaaaaaaagctcatccttactggtcattagaggaatgcaaatcaaaaccacaatgagataccatctcacaccagttagaatggccatcattaaaaagtcaggaaacaacagatgctggaaaggatgtggagaaataggaacgcttttacactgttggtgggagtgtaaattggttcaactattgtggaagacagtgtggcgattcctcaagcatcaagaaccagaaattccatttgacccagcaatcccattactgggtatatcagcaaaggattataaatcattctactgtgtcttacgtgacacatgaacacatatgtttattgcagcactgttcataattgcaaagacttggaaacaacccttatgcccatcagtgatagactggataaagaaaatgtggaaaatatacaccatggaatactctgcagccataaaaaggatgagttcatgtcattttcagggacatggataaagctggaaaccgtcattctcagcaaactaacacaagaacagaaaatcaaacactgtatgttctcactcaaaagtgggaattgaacaatgagaacacatggacacagggaggggaacatcacacacaggggcctgtcacggggtggggaagctaggggagggatagcattaggagaaataccaaatgtagatgatgggttgatgagtgcagcaaaccaccatggcacatatatacctatgtaacaaacctgtacattctgcacatgtatcccataacttaaagtataataaaaaatagtaactcaaaaaattatgttaatcagttctctagtaggtagaaattcatctgggagtttcttctcttgtccattttgataggatctgcagaagacataagaaccctctctgttaaaaatattcctaagttgtacaccatctagaaacatatatacttaattataatttttaatttattaaaaagctttaataagtgcaatgttttctgccttctgagttgatttcataacacatagaaggatatatcctgaatgaaactttgtactagtaatacaaattaaaggttaataacctctacttttattattgaggtattacccaccaatatataatcttaaatcagtgctctcaatggggcttttacctaaataatataaaaaatattttcctgatcttgacacaaaatagatgtgaacacattcttcatattcagccatgtctcctgtctattacattatgaaccacatgctaactttgatttacttgggacttgttctaatttcaaactagttattttttatcttcatgcagctagattattatgtgtgagtattttatcagagagtgataaagataatttaaacaagtaattgtgtgtctcaggactcttcttgggttctgagacaagaaatgccattactacctgaaggattgagacaactttgaaaatgtcagaggaatcatctctaattgcttctaaatttcagttttatcaattcttatgctttctgaattatttttgattttagttattaaaggattctttctttttctcttaatctagctaagaatttgtccttttttaagaaaaaactcttaggtttgttgatttttctattgcttgtaaagtcttttttcacttatttcatttactctaaagcctcataaacacattggtgacaggtagatggagaacttgattgtaaatgccctgtttttgttagacccagctgatcatgtcaggaagccccctgaggggtctaggagctgactgtggctcccaccactggacaaggatgagaacctccatgctttggggatgggaggacatgcagggcagtgtgaggggaggagggttgctggcaggtccagcattgcttcccctggctgcaccactcatgtccttcctcactcagagattcagtcatttcttcccaggtggaaaaatcagttaactttatctttgatatatggatgggagcccaagatagaggcttgtcagtcattatttctgtgcctgctgccttgggaatgtctgaatttctcatgctctgtcctgggtctataccccagtggctcccctactccatggcacccacctgtgcctgtgcatggcccctgatcacagcctccgtgaaacatctggtttggctcaggaagaaccctccctgccttgttttcctgctgtccctggtccacatccttctccatccacaggctctcagtggtgcctcccatccacactgaccctacgtgggttcatatcttgtccaccacttcctctctcttttcttctgcatcttgctttttattccaacagcctgtttccacctcacctggacttatgtacaggaaagtgtttactgagcaggcttgtgttgtgcaaaccctgaagattactgaaaaagtgctttctcaagccacatccatattcagctcctgggagatgatatctgcttttttggcatactcctcctggaaatatttttaaaccattttattaaggtaaggattacatctataagactatacgttatttaacatacttaattcattgagttaagtatgcaaagttaccatcaccatcaaggtcataaacatagcaatgacttccaaaacattcctctttattctttttattcttagtattatgattattattattagttgaaatgtatttttgcttgtgtgtctctgtctctgtgtgtgtagcctgggtgcacactatgctagctgtttccataatgacttatggggaatgcctattattgctgaaggggccagcgtctgagcactggaggtcagttatgcaggtgccacacacatctgtgatgggccccaataaacagcactgggcaccagcactcaggtgagcttccctggtggacaatgcttcacacgtattgtcatgcatcactgctgggagaactggggacaagagacttctcagggaaagaacacctgggagcttgtgcctggattctcagggccttcccactggttcctttgctcattttaattcatattcatttgctataataaagctgcacccacgagaataacagcttgtcttgagtcctttatttgtactgattatggggcctgaggatggtcttgggacactcaacacaattacatcagaggtgtaaattgctagaaagaccctgactactgacacatgtctatagcatttataatatcaaaggatgagaaagtgtaggataaaagacattcagtgcctggatggctatagaatcacatggcatgagatgatgtgtgcactccaataaggagcaggaagtgaaagtaatccatggaatttagaaacgacggacacagctccctaggagttgttccctgaacaagaacaagtaaaaataatgaagaacaacctgagtatgcaactcatatctgtgatagctaaaataatagtaaaaagatgcacatccagccctgcagtgtgccctgtgagccaaggctgctagactcccattcactgccaaagggtacagttgtccagaaacaacacacaacacacaagagctacacagatggtagcccagggtttggactggggaggggaatccacttgacaactagaacagggaggatagtgtggaaagtggcatcattttgtgatatgaatgatatcattaatagatatcatcagatcgtgaacaacattagccaatggactaggagactgactgatgtagcagattctctttggcttcatgtgttgcataagggaggagcatgtttgggaagatgctggacccacagctcacaatagacacatcacagatggctctagctgatcccaacctcaagtaggatgcttctgatgggacagctttcctcaagcactggatcccgatcatgtaaagtttctctaccctgagaatgagactgccctttctctctttaaaatgcaaagtgggctctccagatgaggagcccaatgctgtatatggaagccatagtgctatgtgtttatgttgataccgacggtcattgcttagcatgcatcttatccaggtcctgctgctgtgtgtttctgttgatgctgctggacattgcttcgcatgcaccttacctaggtcatggcctgtgctgtgataaagagaagtccttttgcttctgcaccccaggtacaactcctgtgagcaatctggcaaatattttagaaactgtgtagtttgtattgccttgtcttttcatttgaatcttttagatgataaggaaatgagagtggttcacaagataatggggcagacacaggggatagttaagggcctcctccaagcaatgtggatatcataaaatgaatgttaaaaaatgaaagaactaaacaagaaggtgctggggttgacacaaaggacttaaaacagaactaccaggagttgggtgcagcaatggcaatcccttcagttccatcagcaattcagagacctaaacaaatattccctatttatgttgaattggcagactgtagaaatgtagaagacaaaatgaccagaaaaaatgtgtgatttggcatgggtgaaggtctggcaagttaatcaagttgaggactgttgaagccctagggtggtcctgcctttgctgggtgcccagaccataatggcactcatgggaaattgccagcaagtagaaactaggtgttttttttttttttgtagttcttattatcaggcatatgtgcatttgaattttgtcttcatagcatttcctggttctatttctcattttttaaaacacacgtgatttcatctagatttatcaccttcacagggtcacagagaagggtaggaagaagggaggccctggtttgggtcttgtaggaccatggacaagagtgcggagggacaacagggggttgtaagacattattaagaccttattctgcctctcccaagaggctcagttcagccgtttttctgcagttgcggttctgggttataaaccttgtagactcttcccttcaggccagggcggcaactatgcaaattcaagtgggggcctccccacttaaacccagggctctcctccacagtgagtctccttcaccacccagctgggatctcagtgctttcttttctgtcctcctccaggatggggtcaaccgtcatcctttccctcgtcctggctgttctccaaggtcagtcctgcccagggtttgaggtcacagagaagaatgggcagaagggagcccctgatgcaaattttgtgtctcccacacaggtgtctttgccgaggtgcagctgttgcagtctgcagcagaggtgaaaagacccggggagtctctgaggatctcctgtaagacttctggatacagctttaccagctactggatccactgggtgcgccagatgcccgggaaagaactggagtggatggggagcatctatcctgggaactctgataccagatacagcccatccttccaaggccacgtcaccatctcagccgacagctccagcagcaccgcctacctgcagtggagcagcctgaaggcctcggacgccgccatgtattattgtgtgagagggaccatctaaaaccttccgcggtgcaggtgcagagtgagctgccagacacaccctccccaggggcctctctattcatccggggaggaaacactggctgtttgtgtcctcaggagcaaaaaccagagaacaacatgggagcgttcctaacccctaaggcaactggatgggagacctgacccatccagttctctgagggggctcttgtgtgttctacaaggttgttcatggtgtatattacatggttaacatcaaaaggctgcctaataggcacctcttcaatataatagtcttttaattagtgaaaattttacacagttcatcattgcttgcttgccttcctcccttctgtccgctcttactccctccttcttttattttctacttacttttccaaaatcatttaacccctttttgtaccattaataagttatcttgtttttgttgttgttttccttttaacaatatgcactgaataattcatctttgtgccaattcgtaaatattttgatataacaaagacttctgtcataaatagatttcctgtgagtaatcttgcaaatattttagaacctgtttggttaagaataaattaaaataaatagacaaatttttaaagacatacaacctatcaaaactgaaccaccaagaaataaaaaatctgggctgggcgtggttgctcatatgtgtattctcagcactttgggagaccgatgcgggtggatcacctcaggtcaggagttcaagatcagcctggccaacatggcaaaaccccgtctctactaaaaatacacagattagctgggtgtggtggtgttcacccgcagtcccatagtcccggctactcgggaggctgaggtaggagaatgacttgaacctgggaggcagaggttgcagaaagccaaaatcgagccactgcactccagactgagcaacagagtgagactccaattaaaaaaaatctgaacagaccaatgagtaaagagatcgagtcagtgatttttccaacatctcgaatcaaagtccagaacttcatggcttcactactgaattttatcaaaaattaaaaaaaacctagaatctctactcaaatttccaacaaaataaagagaaagaaatatatccaagcttattttggaaggccctatttccaaagcaaggaaaagacactacaagtaaataaaactacaggccaatatccctgattatcatagtttcaaaaactctcaagagtgatgagatgacaaacaaaattaaacagcagattaagaatagaattcaccattatctgtgtctcccatacccagagaggctgctgcttgccctgcacaaggatactctgagcagaaacctacctggcccagccctcaccttgctttatgcagccatctgccctggcagcttaacacaaaggacagcatcttttgggagatacatggccacacccactgcctgagaatccacagtagcccctattcctgggcaacataagccaagcaaaaaccccactgttaatactgtagctggtgctctttggaaagcaccatctccaagcaggaagccaataaacagtccatcacagtatctcctggtagactatcactgcacccagaaaggagaaaatgactgtgtgatctcagctatgaccagtgcctgcaccactctggatgaccaggaggtcctgagtctgtccatgtgaacagttcattaccgctataaccagcattcaagaaagccagtacacaaaggctatcaatatctaaggaatttcagtctccatcactcccctgctgcttccatcagacctggttcactgctcactgctgaaaaattgaggacacatcacaccaccggatccctcacatacattccccaacaccagcctgaagtgtgtcaacttcactgggcggctagacctagagaagcaacaacactcacagtagtatggctcccaggttctcctgctcctaggggaagggagtgcaccacattgagggaacaccctgtgggacaggagaatctggatggcaggccttgaacatcaatcagatccctccattggtgggaaacttcttttagtagaggcagttacagtgctgagctcagcagagaaagtcttcagctctgtctcaacagtcagatatccctggtgcatgtgaaaaacttgaagaagaggaagtctttcccccttgtacaccactgcaggcacacttggggtctctcccataagagctcagtacgggtgcaactatagacagcatttctggaacacatcatgttgactgcatcccccagaaagagcactctccaggttcaggttttggccagacacagagtcacaattcctctgtatttaacacttcaacttttgtacagaggaaaagacatgcctgtctgatctgaatagctggaatcctgggatacgggagtgtcttagaggtgcataactttcctacagacctggcaagacagctgaggtggctccaacccttcccccagataagacctcagtgtgactcactaaaagctcctccagccaactctgtcaaggctgggacttcatttaccacctgatttagccacagctggtttctatccagggacaagccccctactggtctgaagcctgaaccatcaaactagcaaataaatcactgggggaaaataaataaatacgtgcatgccacagaggaatgaactaaggtttaatagacctcaaccattctaaccccatagaagacagtgaacttgctcacatactgagcagatttctactgcaatcaacacataggaaagccatcatacaaagattctccataaccacggaactcttacagagtcttcacccctctaaggaccaaaaaccaaattagactgtaattaattataaccattaaagtctcattcttaagggaaaaaataaatttaaaaacaaacaaaagaaacagttaaaacaaacataatttcaatactagttagaagaaatagtctaccaaaataagaggaaatgagaaaaataactcaagtaatatgacaaaacagggtgctataacatcccaaaaaggtcacactaggtctccagcaataaactttaaccaaaatgaagtctttaaaataccagataagaaattcagaatgttgattattaagctactcaagaagatataataagaaggtgaatatcatcataaacaaatgtataaaagcagttcagaatataaatacaaatttttatagagagatagatatcataaagagaaaccaatcagaacttctgaaaataaaagacaaaatgcagggaaatagtaagggaattacaaaatgccatggaaagttttaaaaatagactagaaaaaagtagaagaaaaaataaacaagagactagaaaaagtacaaaataaaaagttgaagtaaaaaattagatgaaaaaagaagaagaataaagtagaaataagaaaaaagaagaaataaaaaagactatttttgaaataatcaaatcagagaaaaataaatttagaaagaaccaaaagaagtaaacacagtctccaggaaatatgggattatgtaaaatgaccaaacctcagcataattggtgttcctgaagaagaaaaaaaataatatgtttggaaaacttatttgagagaaaaattgagaaatacattcctggcctgcctagagacctagatatccaaatccaagaagttcaaagaactcctgggaaatgtattgcaaaactgccttcaccaagcttatagtcatcaggctaccgaaagttaacatgaaggaaataattctaagagcagcaatacaaaacaaaacaaaaaacccatcagactaatggcagacttctcagcagaaacttcaccagccagatggattaagcttctatcttcaaattccttaaatagaacaactttcaatcaagaattttgtatcctgccaaactgtttgataaatgaaaaagaagtaaagtcattttcagaatcaccagtgctcagggaattcgtcactaccaaaccagcagtacaagaaatgctaaaaggagttgcaaaccttgaaacaaaagcccagtaagcacataaagggaacctcttaagagcctgaaactcacaggcctataaaacaataacacagtgaaaaaaaaaaactaggtaagaattaacatggcaaagaaaacagtaactcatatctaaatattcacattgaatgtaaatggcctaaatgctccatataaaagatacacaatggcagaatagattaaaaaatcacaatggaaatatctgatgtctctaaaagatccccctaacacacaaagatttacataaactcaaggtaaaaggttggaagaaggtatttcacaaaaatggaaaccaagagtgagcaggagtagctattttgatatcagacaaaatggacttcaaagcaacaacagtaaaaaaaagacatagatgatcactatacaattacaaaaggatcaattcaataagaaaatactacaattctaaatttataggcaccaaacaccagaggaactagattcataaaacaagtactattagagatttaaaaaaatgagagcgaaacaatcagagtgggagactttaatacaatcataacagcactagacagatcttcgagactgaaagtcaacagagaaaaaatgcacttaaataactcactgaaacaaatggatgtagcagatgtgtacagaacattctgtccaagatctgcagaataaacattcttgtaatcagtacatgcaacattctacaagatagaacatataataggtcacaaaacaagtctcaatgaatttttaaaacagtgaaatcatatcaagtatcttctcagaccacaggagaataaaactaaaaatgaactctcaaagaaacccttacaactgaacaaatacatagaaattaagaaatctgctcctgagtaatatctgggttaacaatggcataagatgaaaatttaaaaattaccttaattaaatggtaacaagttattgaaaccttaagaatacagcaaaagcagtggtaagaggaaagtttatagtgactactgcctacgtgaaaaagccggaaagagcacaagttgtcaacctaatgttgacacgagaaaaaagaaaaaattaaagaaagaaaatataaatcaaaaaagagaaagaaacaagctgcctgtgttaggctgactcacgtcaaaggcagtaacacgcaaagtttcaatgatgttatctaagggccggagctcagaggaatgggctctgaagactctcccagcactccctcagcataaggatgaaaagaggtaagttttcctatctctcctttagtgtaagtgaacttccctgtcgaatctcatcccctctgctatgtaaactataccttgcctcttgctctgtacgttttaggagtttctgtttttcctgtagttaatgattgcaggttcctgcttctgcatctaagcagtacagcctgagcaggtctggcttgtagccagctacatgccatggtgggggtggcaggatgagtctttgtgagactcctttgaactaagcaggtaatgaccatctgggctgcatgggaaggagtattgctaaccctgagttacaagcctggctttgtttgattaacggcctctgtcttgcctctgtacgtgcgcgttcgtgccacttaggaggaggtgtataagcaaaaccttgtctttgttcggggcccagttgtttggacgttgagtcccttgggacagagtgcactcagtgaagaccctcctgctatgccccgaggtgtcccttgccctcctgatgttccgcaacctttcttgcgagccagcagccaggaggagaagagaggacagattggctgtctcctttgccggagggtctggggctctggtcgcggcgatctgtgaccccagggcggcctcggggagcacttcagcccggaggggagaccggctctccaggcccccggggcccctcccctgacagcgcaaaggagcgcggaaagggctgcgggatgatcccagaagcagcgctaatgaaccgcggtcggcttttggggcccaaggcaggacccgtcccacgaggacggaggggagccccatcacctgccgggctgtgcgtctagtccgacccagggaggctgcggcggcgagagggggtcgctcactcgggtaccgcagacgccgcaaccgacgcggcacaggagagaggcccgccaggccggttaggaaagggaactggggaggggaagtgggtgaaagggcgtgcaagagacggctgcaggaggggccggtgcggggagtgacgtgggaggcgcagatctcagcgtggactgggcgctcccagcgaagcctggggccgacctgggatagcggcgaagcggctggtaggagctgccccgtggcagcagcggccgtgctgggaataggggactctcctagccaggcggccccgaaaactcctgtaataggagacgctctgctcggtaaaaaaggaagtcagagtgagtgtgcgtcgtagagggaggaaatgggaggaaaatcgtggaaacccactccactggaatgtatactaaagaattttaagaaaggttttgcagcggattatggaattaagctgaccccctgaagttgaaaactctctgtgaatcagaatggccttctttaggggtcggctgccggccgagggtgctatatagatagggaggtgattggccgggtgtttaaggtggtgaccggggtgggaggacagccagggtacccagatcaatttccctatatcgattcatggctcaatgttatacaaaactgaccagcgtggttgcaccccccagcagcatattgtaagacgcctgtggcccgagcagccgaagacaaaatgaaagtaaaatcagccatgctggcagctgcagagaaaaagggaaagtcacaggaaagccgagataaaccagttctgcgggcacctcaggaggaaacagaatttcctcctcctcctcatgttccaagccacccccctttgccgagaccaactgctccctctgcaagttcagctgtgaggccagcagccccagctgtccatggggagttaaatccgggagagtatactcccccagcctcaactaagaaggaggaattggagctgcaggaagttagagtggaaagcccagaaagtcaggcaggccatctcaggtctggccgcacctgagtcctgcaaatgcgtctcagggagacgaggggacctgtctattatgaccagcatggccacatccagaggggagagtgaactttcgtttaccagcccttttcaaccactgacctcctaaagtggaagcatcatattccctcttacatggagaagccacaggctctcgttgacttgatgcagtccgtttttcagacacacaatccaacgtgaccagattgaaaacagcttcttttgaccctgtttaatatggaggaatggcagagagtgacacaggcagccctccagtggctaaaactaatgcacctgcagacacagttaatgcccagacatatgcatatttgaccctgtttaatatggaggaatggcagagggtgacacaggcagccctccggtggctaaaactaatgcacctgcagacacagttaatgcccaggcatatgcacgggtcagttccctgaaacaaaccccaattgggacccaaatgatgcaacccagttgcagcacctgcagcggtactgagaggcaatctttcatgggctgaaggatggtgggagaaaagcagttaatataggaaaaatctcggaggtgctccagggagcagttgagagcccaagccagttgtattagagactttgtgaggcttatcggctgtacaccctgttcaaccctgagactactgagaatcagcatgtggtaaatatgtcatttgtaggtcaggcccagggtgatatcaggcaaaatttgcagaagatggaaggtttcgcgggtatgaatgctactcagcttattgaggtagccaccaaggtgtacattaacaatgatcaggaggcaaagagggaggctgattgaaggcttaagaagaaggctgatttactggcagctgcccttacgggaagggaagctggttttgcaaggggatgcgggtatggatgagggcatggaagaggccggactggatggggatttgagagtcagctgagactagaaagagatcaatgtgtgcagtgcaaaaggaaaggacactggaagaatgagtgtccagagaataacaaggagaatggtcagggctgtggtatgggaaggccaccagcagggggctgccgcacctgggaggaaccagacactgacctaatcggactggccagggctgaaggatatgaggactaggacagaccgggctctttctctttgggcacccaagagcctatgttcagattagaagtggaggccaactagtggactttatggtagatactggggctgagcactcagcagtgacccgacctatagggccgctatccaagaactgtgcaactattgcaggagccactggagtctcagagaagaggcctttctgtcagtcaaagaggcgtgttataggaggacaaggagtccaacaagaattcctgtacctcccaaattgtccagttccttcgctggaaagagacccatttcaaaaactgcaggcacagattacatttgggccacaaggggatgtaactttaaatctagctcactcagaggctatggtgttaacccttactgtcccacgggctgaggaatggagactatatgcaggaaagactccagaaccaggagtaaattaaatgcgtgggttacttactaaaattactggagtttgggctgaaagtaacctgccggaactggcagtaaatccggcaccaattgtagtggagttaaaactgggagcgactctggttcatgtccgtcagtacccgcttctccctgaggccatacgggagtccacaaacacttagattgacttcacaggtgaggaaccatagtcaaatgccagtcactatggaacacccctctcttgccagtgtggaagccgtctggagaatataggccagtgcaggacttgtgtgcagtaaaccaggccacggtgaccatccacccagtgctgccaaacctgtatactttaatgggacatattccagtgagtgccacttggtttacagtcctagatttgaaggacacatttttctgtctccagctggcaccgattagtcagcctgtttttgctttgcaatggggtgaatcacagtatacttgaacaagactgccacagggatttaagactctcccacaatctttgaagaggcactggcctcagaccttaaagcctacaccccaccaagcagtgactgtgtcttgctctagtacattgatgatcttcttctagcagccccaacctggaaggactgctttcaggagacccaagacctcctgcacctgttatggaaggcaggatataaaggcaggatataaagtgtcagggaaaaaggatcaaatctgctctgaaagtgtccagtatttaggcttctatataagcgaagggaaaagattgcttggtagtgaatgaaagcaggcttttgtgtgcttcccactccaaccacctggtgacaaatgagagagttactaaaggcagctgggttctgccacatctggatcccatgtttctcactcatgggtaagccattgtatgaagccacaaagaggggaaagaaggagcccctcctctgggaggccacccaggaaaaggccttttaataaatcaaaggagacttgactgaagctccagctttagggttgccagatctaactaagcttttctttttatatgcccatgagtgaaaaggaatggtcataggggtcctaactcaagtcatagggtcatggcaccacccggtggcatatttatccaggcaattagatactgtggcacttgcatggacccttgtttaaggcattagctgctactgcttcactggcacaggaagctaataaactgactttgggacggcaactgataatccaggtaccatactcggttataactttaatggacaaaagggggcaccaatggttataaaatccgagaatgatttgatatcaagagctcttatgtgaaaatccctgcataactttagagactgtaaataccctaaacctggctaccttgcccccttcattgctgtgtggacgtagcagatgaagtgttctcaagccagagagatttgacagatcggcccctcggggacccggacattgaatatttcactgatgggagcagcttcatcctagaggggcccgccgagcagggtatgcagtagtgactttggactcagtagcagaggcatagtctttgcctacaggaacttctgctcagaaagcagagctaatagctctgacaagggctcattggctagcaaaagaccaaaagaccaatattcacacaaactctaaatatgcttttgccattttgaatgttcatggggctatttacaaagaaagaggactcttgactgatggagggaaagaaagaaagtacaaggaagaaattctacagcccttagatgctgtgtgggccccgaagcaggtggctgtaatgcactgtagggggcacctgagggcaggaacatcagaggtgaaaggaaacagaaaggcagacaagaggcaaagcagactgcagtggtgactctgccttctaaagaggaagccttggctatgcctctccttccagaaattcccctcccagagaccccaagctacactccaaatgaaagggctttttttgcccaagaaaatgggagctacgttgaaggaggatggtggaaattctccaatgggaggctagccataactgaaatggtggcccccagatttgtaaagcagttccaccaagggactcacatgggaaaaacggcactagagacattattaggttgtcacttctatgtgtcccagcttacggctatcacttgagcagtttgtgaacggtgtttaacttgtgctcataacaaccctcgacaagggcccacttgaccccccaggaattcaggaaacaagagccatccctgtgaaaacctgcttatgggcttcaccaaactgtcctgagcagggggctatcagtacatgttggtgcttgtctgcaccttttcaggatgggtcgaggccttctccacccagacaaagaaggcatgagaggcgaccaaggtattgttaagagacgttattcccagatttggactacccctgactctggggttagacaatggactggcatttgtggctgaagtagtgcaggacttaactcgactattaggaataaaatggaaattatatacagcctgtaggctgcagagctcaggtaaagtggagcacatgaactggacactaaaacagctactgaagaaattttgtgaggaaactcacctgaggtgggatcaggtcttacccgtggtcctcctccaagtcgggtgcacccgcacaaaacaaaccgggtgttcaccctatgagattttattcggccggccacccccaatcacaggtcaaattaaaggtgatctctgtgagttaggagaactctaaggaagcaaatgcaggctttagggctagctatgcagaaagtgcatggctgggtgcaagaaagaatgcccattggtctgacagacccagtacaccctttcaaacctggggacctcgttggggttaagaaatggaatcataactctgggacccatatgtgatgggccccatgttgtaattttgtccactcccactgctgttaaagttcagaaatcgtgccttggatccaccacgactggctgaaaccggcagcccaggaccagaggaccagctagcaggacccagaccatccgacccagctgaccctgcgacgagactgggttcccagcggagaggacaacagcccggctctgcttacttcggaagctgaccagtctatgcatggtggaagcttgagaaaacagcaagctctgctctagtcactctggaagctgactagtttacgcatggcagaaagcttgagtcgtcatcatcagatgagtaaatgtggccagagatcttaggtccagtaatcttatttgtattattaattatattactgctgtgctattgcttcaacaaatctcctccaccctgcccatgctaggtgtaagaatgctacaccttgccttgtttctgtcgatccccatatctgtcctaggagaggaagagcctatagaggaatgtccacattgcatgtgtactacgtggataggtaatacactagttaagactttattgtaccatacatactatgaacgcacaggaacccctctggggacttgtatgtacaaccaaacgaactattcagtttgtgacccaggggatagctagctttatgtatactatgaccctaagcttttacctgggcctggtttgagattcgcactgggtcaagggaaggaagtcttttaaacaagaccgaagtttctctctcccacaagggagtcacatctttgtattttgatatttgccagataacatccatagactcactctttcccgtaatccacagttccatggagtactataatagctgccataaaagtaagtgtgcatcccctgcttgctccaccggttccctggtaacaacttgctggggctttgcaacatggcctactaaccaacaatcactagggctaatcatgcttaccaaaataccttcagaaccagattgtaaaactaacatttgcaatcctgtgaatcttaccaccttggagccaaattggctcgtatggactacaggtttaaaagcaccactgagggtacaagccagcagccaagaaatagactcaagagtctatgtctatattatatacataaaaaaaaacctgaatccttcttgcccagcagcagttccaagtctttaagtcattcaatgagcactttaagcaggaggtacctgaagctcctcctcctatagctgtagatctgtttgcacggttggctgaaaacagctggcagcttaggtgtttcctcatgctttgtctgtggaggaacaaatatgggaaaccagtggccttgggaaacaaaagagctatcgcctcaagaaaattacactttaaccctttcatccccagagccggcactcacgagctcaagtgtctggctgctaaaatcttctgtcattggaagattctgcattgcccactggggaaaagcctttacaaacccagtaggggaattagtctgcctaggacagcaatattacaatgagacattagggaaaactttatggcggggcaataataagcaaggtaaagatacaaccaggttgccatgccataatccattttcccattttcactctttaaaccactcctggtatcaactagaggcaccaaatgaacacctagcaagcaccttctggcctcgactggatctgtgggccatgagcttattggcaattacctgccaattggacaggggcctgtgtgttggggacaataagaccatctttcttccttgacccgttacaacagggagaggttttagggtatcctatctatgatgaaattaaggggaggagcaaaaggaatatagacataaaaaaagatataaagataggagattggaaggacaccgattggcctcctgaaagaataatttaatactatgggccagctacatgggcacaagatgggatgcagggatactgtacccctatttacatgctcaacagcatcataaggttgcaggcagtacttgaaatcatcaccaatgaaactgcaaatgcattagacctgctggcccagcaagccacaaagatgagaaatgccatttatcaaaataggctaggcttggactacctcctagcccaggaaggaggcataggcgggaagtttaatctgacaaattgttgtttagaaattgatgataacagaaaggccatcatggaaataactgcaagaatgcaaaagctagctcatgtcccagttcagacctggaagccaatatggtctctagattccctttttggaggttggttttcaggttttggcagttttaaaacattaatagggatagtactagctatattaggaggctgtttaatactcccctgcctcttacccctccttatcaggggcatccaatcaactatagacgccgtagttgacaaaaccatcaccacttgactaatggctctaactaaataccaagctgtaccaaacgaagaaaacttgccttatcatgaagaacaaagttgtagtgatgacttctattaaaatttcatacataggaggcatcaaaggcagggtatgagatgggaaaaaagaaaaaaattaagaaaaaaagaaaatagaaattaaaaaagagaaagaaacaagctgcctgtgttaggctgactcatgtcaaaggcagtaacacgcaaagtttcaataatgtaatttaagggccagagctcagaggaatgtgctctgaagactctcccagcactccctcaacataaggatgtgaagagataagttttcctatctctcctttagtgtaagtaaacttccccgtcgaatctcatcccctctgctatgtaaactatatcttgctccttgctctgtaagtttttggagtttctgtttttcctacagttaatgattgtaggttcctgcttctgcatctaagcagtatagcctgagcaggtctggctagtagccagctagacgccatagtgggggtcgcaagatgagtctttgtgagactcctttgaactaagcagataatgaccatctgggcagcatagtaaggagtatactaaacttgagttataagcctgtcttagtttgtttaacggcctttgtcttgcctctgtacattcgcgtttgcaccacttaggagtaggtatataagcaaaaccttgtctttgttcggggcccagttttttggacgttgagtccactgagacagagtgcactcaataaaggatcctcctgctataccctgaggtctcccttgccctcctaaatttctgcaacaatgtcacacctcaagaaactggagaaataagaacaaactaaacctagatccagaagaagaaaagaaataacaaagatcagagcagaactaaatgaaaatcaaacaaaaaacacaaaaaaccaatgaaataaaaagttggttatttgaaaaaataatcaaattcatggaccattagctatattaaccaagaaaagaagagcaaagatccagataagttcaattagaaatgaaatgagacaatacaatctacactgctaatatataaaataatttgagactactatgtacaacttcatgtgcacaatctaggagacttacaggaaatggaaaaattcctagaaacatacaactctcctagattaaatcaagaagaaacagttactttgaatagatgaataataaacaatgagattgaatcagtaattcaagaattgccaacaataccaacaacaaaatagggccaggtgaattcacatttgaagtctacacaaaattcaaagaaaaattgctaccattttttctgaaactattttttaaatttagaaaaaaagaatcctccctaaattattctctaaagctactataacccagatacccaaaccaggaaaacacacacacacacacacacacacacacacacacacactctctacatacgaattttcctggtaaatatagatgcaaaaatactcaaaaaatagctacctgagtccaacagcacatccaaaagataattcatcatgataaaagtaggtttcaactcagaaatggaaggattatttgaacatacacaagtcaataaatgtaacacatcacataaacagaactaaaaacaaaaactataggattatctcaatagatgcagaaaaagcatttaacaaaattcagcgtttttaattataaaaattctaagtcaggtaggcatagaaggaactgacctcaaactaataaaggttatataggaaaaactcacacccaacatcatgctgaatgtgaaaaagttaaaagcattccccctgggaacagaaacaatagaagaatgtccatgttcaccagttctattcaacatagtgctagaagttctacccagagcaattaatcagaagaaaaaaataaagggcatccatattgagaaagagaaagtcaaactatcactgtttacagatgaagtgattatatacctagaaaaccctaaactcccccaaaatactgttagttttagtaaatgaattcacttatgtctcaggttacaaaataaatgtacacaaattggtagcactgctatacatcaacaacaacaaagctgcgaatcaaatcaagaactccatttcttttacagaagctacaaaaagatatttaggaatatacttaaccaaaaaggtaaaagatttctacaaggagaactacaaaacactgctgaaagaaatcatagatgacacaaacaaatggaaatgaatcccatgctcatggattggaagaagcaatattgtgaacatgaccgtaatgcccaaagcaatctacagattcagtgcaattcttatgaaaatacccacattattttttacagaattaaaaaataataatgttaaaattcatatgaaaccaaaaaagcccaaatagccaaataaatcctaataagaaaaaaatggagccatcacattactgaacttcaaattataccacaaggctgcagttacctaaacaacatggtactgatataaagtaggttcatagaccactggaacaaaatagagaacccagaaataaagccaaatatgtaaagccaactgatgttttacaaaacatacaaaaatataaattggaaaatagacaccatatttaataaatggtactgggaaaactaggaagccacatgtaaaagaataagactggatctctatctgtcaccatataaaaaacaactcccattcaaaacttcaaagaaatgcatttacataaattggaaaaaaactctttataatttgtatggctggggtgattgacccaggctatcaagatggaatcatactactactccacaatggaggtaagaaatagtatgtttggaatacagggggatttcttagggcatctcttagcattactttgccatgtgattaaggtcaatgggaaactacaacaacctaatccaggcaggcatacagatggctcagattcttcaagagtaaaagtttaggtcactccaccaggtaaacaaacaaacaaatgaacaagaaacaaaactgaccagccaaggtaactgctgaaggccaaaaaatacagaatgggtagatacaagaaagttgttatcaataccaggtatgaccatcaaccagaaatgaggactggaattgtcatgagtatgtctttcttatcttcttaagaatatatttctgcatgtatataactgtactaagaaaatgttttctttttgtttttcatgtaacataagatttatcgacttcatattagcatttgagagttgttaactgtatatagtggcatttaggttaaggattagtgcattttcagttgtatgaaggatagctgtattatgttaggcataattatgaccttactattgtctttatttggagatcgagcatgatttcaggtgatatgtagggatgctaagttgacaacaagggattggcctgtgatagttaatattaggtttaacttgattggattaaagcatgcttagatggctgggaaagtattgtttctttgtgtgtctcttgggttttgccagaggaggttggcatttgactaagtagcctgcaagagaaagacccagccccaatatggaagggcaccatccactcagctgccagcacagctagaataaagcaggtggaagaagaggagataacattgcttgctgcgccttctgtttttgttttgttttgctttgttttccttgctggctgctttcttctgctcttcctacccttggacataagatttcacgttctttggcagttgaactatggggcgtgaagcaggggcttgctgagggttcttgggcccttggtcagagaatgaagtgtgcactgttggcttttctggttttgagacttctggacttagactgagccactaccagtttctctctcttcccaagcttttagaaagcctatcatggaactttcattttgtaattttgtgagaaaattctaataaactatatttcctatatacatatgttatattagttctatttctctagagaactctgggtaatacagctttgatacaaaaaacaacattgttgtattcacaaaaatgtatcctaagataagccaacacataaaagtgcataaagtatgattctatttctaggaattataaaaaatgaaaatgaatctaaagtaacaaaaaaagatcagtagttgcctaaggacagattggaaaattatatttttccaaatgctacaaatgatactctcacctactatgagcattgctctctcctcaggaatttcacccaagaaccgactctatagtcggagacatgcaaacaggttcctgttcatgtacgaactcttcctaacactttcttttcatgtacttccttgacttatttgttgatgaaggttgataccataaaaataactaaaccaggctcacattagagaaaaagaagagagtgatggaaagattaagccggagcatccagtttcagtgattctttgaccctgccctccctgaagtctagaggcagagggatgagccctgctgagcagttcacacttgtccacagggagaaagaggtgtaaatgtgccccccatccatgctcataaaatggcccatggacagcttatcccctgtccatgaaggggatgccacctgatgtcggtgcccttcctcagtgtccacaccttagggtctctgctaatctggggttctcttcttattctcagaggtagggtccctgtggatcaagcctagctgtggctgcttctcagcctgttccctctgtgtttgtaagagtcctacaagaagttcactggtggaatctggaagagaaatgatacagcctaactgttctcagagccttttttacaaagcctctgaatttaccttcattgactctagcatgagctcagcccagcaggcttcaggacaggggttggtgtgggaggcaaaagcgagggattcaagtggaatttgttagtggtaccctccatcaatacaaagaaaaatcataatcctcagggacacccttgtcagcacagtctccctcaaaatgaccaacctgagagccgaggagaaggccatgtattactgtgagagacacaggagatatccgtgtggcaacctaacacaggggacacctgtatttgtgtctgagcccagacacaaacctccctgcagggagacaggaggggaccgtgtgacagacactgctcagaaccaccaaggggagctcagaaccagcaggaggcagtggggacacaaaggaagactcaggagccaccagggggcgctcagaaccacctgggggtggtgaggacaccagggggcgctgaggacacaaggggaggatcaggacaccagggtcggctcaggacgcgaggaggtgctcaggacaccagggtctgctcagaaccaccagggggcactcaggaaccaccaggagaggctcagccaccaccagggggcactcaggacatcaggagctgctcagaatcaccagacggcggctgggcgcggtggctcacgtctgtaatcccagcactttgggaggccgaggcgggcggatcacgaggtcaggagatcgagaccatcccggctaaaacggtgaaaccccgtctctactaaaaatacaaaaaattagccaggcgtagtggcgggcgcctgtagtcccagctacttgggaggctgaggcaggagaatggcgtgaacccgggtggcggagcttgcagtgagccgagatcccgccactgcactccagcctggggtgacagagcgagactccgtctcaaaaaaaaaaaaaaaaaaaaaaagaatcaccagacggcgcacaggacatgaggtggcgcacaggacatgaggtggcactcaggacacaagggggagctcagaaccacctgggggtggtgaggacaccaggggatgctgaggacacaaggggaggatcaggacaccagggtctgctcagcaaccaccagggggcgctcaggacatcaggagctgctcagaatcaccagacgtcgctcaggacatgaggtggcactcaggacacaagggggagctcagaaccaccagggggcgctcaggacatgaggtggcgctcaggacacaagggggagctcagaaccaacagggggcgctcgggacactagggggtgctaagaacaccaaggggcggtcaggacatcagggttctcttaggaagcagtgcatcatcaggtccctggggagggtgggtttctttatttaggccttgtgattcctgacctggtaaagtgaaactcttctcagcatcttttgccatttcttccttggaatccatgtttctcttacctacaaaatcctaacttagaacaggaattcaattaaacttttaattctttatatttttgtaataatactagtaataatatctcagtacaattttaaaatgaagaaattgtgtatgcttacttcaaactatttacacagatttttgttactgtgctgtgtcagtcacacttttgtaaatgttttctaacaataactcagcatatgcatggtgttgagtttctttttcttccatttgctgattgtgaagatgaaaccccactttaagggctcctgtcctccactttggtggcccctggtgttctgcccctcagtctgtttctccaccttcccttcttctttccaaaccttttataatcctcaatttccattcaaggaatcagcaagcccgtttattatgtctcatccatgtctggtgaatcagttcacttccctttatgatcactgaagccaaccaagtataggcaggcaacagttctaagaatatgctcatctacctgcagactctctgccctcctcacccctttcaacggtcctgcagacatcaccccaccccatcctctatcttccctaagtaccacagagtgggctctgcagctcctgctgcccactgtgtgctcagccctggggctcactagtgctttgatgataaagcctaaatccctaacgtgtttgcacacttcctgaccaccctctagcaagttgtcattgtgagtgaatcctgggaaccctgtgctgatattaattctatatttatggatattctctagcatccaggaatattgtcaaataacctatcgagttgatgttaaaaattcatgtgaagccattgcaaaagaaaaaagtctttaaactggaaattgctattttttaatacttaatatttttttaatttaatatttaaatgctatttaaattagaaaaaggtgatgccttttgtaaagtacaatgttatttcaaccaatcgtgtaataaaattttaatagagatgcttgccttattgattattatatttatttataacattaaatgcattaaaacatttatttaaaaaatatgctattagtaaaaatgggaaataagctagcacagagtatgtaaagaataccattgtatttttcaatgatagatttgtcaataatggcagttacagtaagttttattaaaacatgcatttacatatatttcttaatttacattggaatagacagacttactcatagaagaatgttactttggactaaaaccttaaactataaatacaaataaatccatataaattaaatataataacacagaaacaaatgtatgtcactttgatgtttggaaatgcatttatttttgcctgtgcacatatatgtttcattgctgggtgtgtgtgtctgtgtctgtatatatgggtgtgactgtgaagtttcaaaatacattattaacttgtatagttatataaatctaagtttttttatgttaaaagatagtaaaaaaacacacacaaaaatattctagagagcatttgcaataactaaggagtattcaggtgttgtattaataatgaaaaactagccaaaatgtttttaaacttttattttaggttcagaagtacttgtgcaagtgttgttttataggcaaattgtgagttctgttggtttgatgtacagattattttgtcaccaaggaaataagcatagtacctggtaggtagtttttcaattctcaccctcctcccaccctccacactcaagtaggacctagtgtctgttgttttctttgtgtcaatatgattagctcccacttatacatgagaacagatggtttgtaattttctgttactgtgttactttccttaggataatgacctccagctccatctatgttgctgcaaataacatgatcttattcttcttatgactgtgttgtattccattctgaaatatacataaatcagtaaatgtgattcatcacacacacacaatcatctcattgatcaatattaactttcaatgtaaatctcccaggaatctttcatcttctcttgaccctcccctctcctcaggcatcccaaaccatagctttctatatattaggatacatgaaaatagggccctctctcagctgatgaaaaccagcccagccctgactctgcagctctgggagacaagccccagccgtgcagtaccaaggtgcttccattcagtgattagcactgaacactgaagacatcccatggagttaggaatgcgctgggttttctttgttgttgttctaaaaggcaatcaagaagaactagaaatattgtctgtgagtgatatgagtgagagaaacagtggatctgtgtggcagtttctgacaagaatgtctctgtgtttgcaggtgtccaatgtgaagtgtagctggtagagtctgggggaggcttggtacagcttggggggtccatgtgactctcctgtgcagcctctggatacactttcagtaactatggcatgcactaggtggaccaagctccagggaagggactggagtgggtcttacattaatgctagtggtggaggcatatactactcagactctgtgaagggccggttgaccatctccagagaaaacaccaagaactcactgtatctgcaaataaacagtttcattgctgacaccatggccgtctattactgtaagagacacagtgaggagaagtcagtgtgagcccagtcacaaacctcctacaggaacgctgggaggaaaatcagctacagggctcactcaaggcccactgatcagagtccactccagagggaggttcacatggaggttaggggctggttttctgtcaggacattggacttcatcatcttcttccattactttctttagggagcctcttcattttagaattctgtgtgtactattgttatatatacatatatatatatatatatatataaaataatcatagtaatgcgaggacatattttctcatgcacaaaatgtagattgacacttacagagaagaaaaattatcaaccaatgtcaaaaacatcagagtcctggaaaatcttaagtgttctggtgggtcatctctaatcagacccagaacagtaacctcagtgaaattccatgattcagatactatttttggattctgatcataaccaagacagagtctggaccagggtcagtgtcatatagaacctcacagcttccatatatgacccttctcttgacagtgaaatatgaaattcagtatcagcagtgatttgatttttcttttgctttccgtattctttctttttagttgttgttgtttagttatttcttttgctatatccattttctttttttttagttgtgcctttcacttttggctttcacttttccatttgcttttcctgcttcctgataaagggagatgtaatccctgtggtctaaattccagggctcaagccttttcctgggagctcaggtgggtctcaggatgtggctcctgcagccacgtgaaagaggctgatgggactttctttccttctcatgactcaggcattccacggtgttgtgtggagactcatctgagattgcacgtggccattagtagtgaaggggatgagatgtgggtgtggactgatcctgtgctgtgcaaattgtcattagtagtgaaggggatgagatgtggatgtggactgatcctgtgctgtgcaaattgtcattagtagtgaaggggatgagatgtgggtgtggactgatcctgtgctgtgcaaattgtcattagtagtgaaggggatgagatgtgggtgtggactgatcctgtgctgtgcaaattgtcattagtagtgaaggggatgagatgtgggtgtggactgatcctgtgctgtgcaaattgtcattagtagtgaaggggatgagatgtgggtgtggactgatcctgtgctgtgcaaattgtcatggagtcacttttctcaccatagtgttagaaagagactgtaaaagttgtcagaatcaaactgcaacaatttgtgttaaaacctgggaaatggagctgggaaggccatgagggagggttctcatacacatgccttccataacaagaactgtcataaatagattctgcaaaaccacaaccttgcacaaaggccagcacaaccttaaaataattacttctccaagtacatctgcccagaggtgcctgtgcaatattacactgatgccaccctggttattgatcattttatcccaggttaagtgtctcaaaaccgcatatgtggccctcctcattttttctttaaaacactttccttatttacctaccgaaatgtgcccgtgcacattcccattgcaatgctaattctcaaataaataccactttactttagagtttctttctgtctgatattcaggtttgacaagctgcagatggacttgccaattttctgtgggatacagggtataataattatgagagatgtgtaggcatgttcaatgttcataagagcaaccgtaaataaatgcaggctggaagtctcagagagagctgaatgtgctgaaacaccatactattttatcttctcccattcttttctgattggaatcagacccaaccaggttatcaatgccaatctacctaagctagagccaactgattacggtatcaacagcaacaatagctttttattttctgcttggctttgtattgttaccttgttccatcctctagagtatctatttcagcccttcggataccggtttcagaggctttcccctaaagtgtaatttcttagttttgtagtggtgataagggaggaggtgggtctggatgtgttttagaagttcaggctgtcattctctcccagacagacactttagtacagaacgatttatgtggttgtcccatttctacaggaaagatattcaagagaataagaaagctcttcagtatttggtccctgagaattttacactagagcacattcaccactcttgactttaagcaacctaattaatgtatttgaagccttatcttgaaatagactatatttcatatggcagactctgcctcaggtaatctcataccctgactttgttactctctacaagaacttgtctctccctaaatttcagatttgttgtttgtcttaaaatttcgattatctgaagtatgaaagacaatttgccaagtttcttattttctgttcatctgttattgttgatgttgttgttgtaaaatacaaaaatatatatatttcttatctaagtacttctgcaagctgagtagcagatatttttggtaaaacccagaataacagaagagtccacatattaattagcttcttaataggaaaaatcattatagtaaatttgttcactggactgttacccatcatttataatgtacaaatatctgatacacacaacaaactaaaatatctaggtatttatgctgagtaaaataagccaaaaaaataagtatatatgctatattattccatttctataaattctggaaaatgaaaactaacctacaataatttaatgaagaacagttgttgcctgaggaaatggtagaagaagggaaagggataggaggaaatgtggaacaggagaaaaaattgaggcgaattcacttgtccactttcttgataatggtgatagttatgtcatgtttatcaatgtatactttaagtatatgaagtttattatctctcaattagaccttataaagtttattacaagcaaacaaataaaaaattagacaaaaagaactgatagaaaatgggtaacatatgttaaatgccagttacctgaaaatttatctgcgtgaaccttagttctctccataattttaggtgaacgctggagtgtaacagagtcacaatattttcattaaggcagtaagttctgcaagccacactagacatgtcccgctctgtcctggagttagttcagggaacacagtgatgaggaacacgggctcagataccggaactcactcatctcagacatgagcacttagacacatacataggcactctgtgtgtgggtttactttcacatccgtacatggagaaacattgagtctcacagacataatttacacacatatttaaaatataataaggtgtttgatgctgtttatcacagcacaatttcctcgtaaaagtgcaaatcttctaaataccataagttaccaaactcctgcaggacaccatcatcctctctcggcaatgccttctcctcacgtgtcccaccctagagttttttatgtagttggaaatatgcaaaggaccctccttctttggtgaaaaccagccctgccctcaccctacagttctgggatgggagacccagccctggaatttcaaggtttttccacatggtgattagcactgaacagagaactcaccatggggtttgtgctgacttgggatttacttgttactattttaaaagtagattcagggtgaactagagattttgagtgtgagtggataacagttaaggaaacactgaaaatatgtgccagtttctgaccaggatgcccctgtgtttttgggtgtccagtgtgaggcgcagttgttggagcctgggggagacttggtacagcctggcgcggtgggggtgggggtccctgagactgtcctgtgcagcctctggatttgccttcagtagccactggatgcactgggcctgccaggctccagggaacagactggagtgggtctcatgtattagtactgatgggagtagcatacgctatgcacattctgggaagttctgattccccatctccagaaacaatgccaagaacacactcttatctggaaatgaacagtttgagagctgagtacacagccacgtattactgtgctggagacgcagtgaagggaagtcaggttgagcccagacacaaacctctctgcagaaacacatgaagtaaatcagctacgggggcgctcaggacccactgatcagattcaacctcagaggcagatgcagatacagggtaggagctggttttctcatagtgtttgtaacttccctctccaactgacagtttcccagagaacctcactaatttagagttctgtgcctaccaaaaaaatctccaaatatacaccttttaaaaggtagtaatataaaggcctagtctcacatgcacaaaatgcagatcaccacttccaggcatgagaagttctcaaccacggtcaccaagatcagagtcctgaggaagctcaggggtgccttgtgggtcttctccaatcacattcgggacaggaaactaagtttaattccctgattaaaaaaggctataattccctgatttaaaacgtttcattccctgattaaaaaaggctggaatttttctgattccagccaagaaagaggctgggccagagtcagtgtcacgtacaagctcacaggtttcacgtctgccccttctcctgatatgagactatgcaaagcagtatcagcactcatctgctgcactttttgctgtcaatccattttctttcttttcagctgttgtcactttttcgttttcttttctgctccctgaaaaagaaagatgtggtccatgcggtctaaattccaaggctcaagctcttccgctggagctcaggtggggctcaggctgtggctcctgcagccgcatgggagaggctgatggggctttcttctttccccagtgcttgggaccctccaccgtgtttcatggggactcatgtggaaatttgagtggcccaggggaactgaagggcataagcttgtttggtgagagtgaaacgtgactgtggaattgattctttgttgtgcaaaccagaagaaattttgaattttgtcagaatcaaaacggagtcacttttgttaaaacttttgcaaatgggactgggaaaggccatagaagcagggttctcatacacttacacttggtaacaagaactaccacaaatagagcctaaaaaacacaaccttgcacaaaatccaccacaactttaggaaaaagctacccccacaaggatatgtcctcatgtactgtgagtccaactttccactgttgccacccttgttattaatctttgcagcccaggaaaattgtctcaaagcaacttagcaacttacttagcccttcttattttaactttaactgcctaagaatttataccgtgaagtaattgcttcatttagtgttaatattaatgcccttttgacaatctttgaagctctttttttctgatatttcttccaacataaagaatgggagctttttcaccatataaagaatttttaggaagatatgatggaaagggaaactcaatgtattgttcagtgtttctgcctaacacatcaatctcttaaaatattttgctgtgtctgcatgtgataaagcagatgctaacactggagataaaagaaaaaaatgcacagaccttccacattccaaatcataaagtggtactggatgtgtttctgatgaagtgaaccatgggtcataagtgctagtgcaagtagctttggaaaatggagttcatagcttcttaaagttttgctagttttaatttaagaatgttatttactatttctttttagtacaagctttccagaagattcttgatggtaatggaagtgtcgcatttaagaattacaaatgactcacagagttactttgtaattttttctgtagggtgtacatgtcagtcacttgacataaaagctcatatgtcacagatagaaaaatgaaaattgagccaattttaataactgcagtggaaatagtttttggcaatgagtgcttcaagacaaccacaaaataaatcggcaaaatattaaaatacagcaggaatctgatctcagtttctctgccttataagaacaaggctgtcccacatcaaaattattattcaagctctaggaaaaaatacacttttggattctggaagctaaaagctctctccttagatagtgctaaagtacttgtgaaatgcagagttgtgttcatgaaaaagatgactttattgtgatttttttttttttttttttgcctgttgacaactcaccaatctgtctcagatgtaaagccctgctctatgggttgaatgtggttgcacatgactggcagagactgattattcatatctccaggtgccctgtctttggagcagctacaggagtcaggcccagactagaagagcccacactgaccttctgcatcacttatgctctctctggccactacatcacaaacagtgcttatgactgggcctgaatctgccagcccaggaaagggctggaatggatggggtgcattggtagtgatggtgggggtcctactagcctgtggcaaatggaagcatctcttttttatcagactgaataatattgtagtgttttcttataccacatttacttcatccctttgtgcattaacacttaggttgtttttatatattggctgccataaatagagctgcaattaatataagagcacaggtgtctttacaagttcatgattttatttcctttccctgtatttccagagaagcgtttgctgagtcatattgtatttccatttttgatttatttatgagctgctatactgtttttcataatggtgcaactaaaaaatggtgtagtcatcatgaaaaacagttttagtttttgacataatccaaacacaatgtttgaatctggttatctataggagtttctagtaaaattggtgaatgtaaattaaaaagcagtaagaaaaatctgcaattcagaaatagtgtacccagatggtctttctctccgaaatgaaagagaaataaactatttctcaggtgagataaactaagatattttcttcacacttgaccagtcatacaagaaatattcaagggaatttttgtataaaagccagcatatgaaaaccatcagcttggaaaaaaacacacaaaacctatatttcaatggtagaaacaattaaaaaaggagaaaagaaacaaacattattactacaaaacaacatcaaatcataaaaccaaacagaaagagaataaacaaagatagagatatatacatatatacaaacaatcataaaacaataaagaaaataatttgagtaaatacttataaataataaccttatgtaataaaattcctcaattaaaaatacagtataaaaattgattttattaaagtcccaactctatgctgcttacaagagactcaaatcatctgagaatctacacacagactgaaagtgagtgggtggaaaaaagatatgctacaaaaatagaaaccaacagcacaaatagctctacttatatcagacacaaattttaagtcaaatgctgtaaagggagaccaaaatggacattatataataaaaaatgatcaatgtagcaagaatacgtaacaactgtaaatatacatatatacatatatgttatatatatgtaacaagaacacataattgtatatatatacatatatacacacacacatatatacatatgtacccacacctgagaactcaaatatgtaaagcaaatctattacatagtaagggatagatactaaccttatacaattatagttggagaatttaacacgttatttagcattggatatgttacctagccaaaaattaacagacaaacattggatttaaactgcactatattccaaatggacctgaatttacagaccattgcaccaaacaacttcagaacacatattcttttttttttaagaattaaatggatgtgtttatttatctttttttattattattatactttaagttttagggtacatgtgcacaatgtgcaggttagttacatatgtatacatgtgccatgctggtgtgctgcacccatcaactcgtcatttagcattaggtatatctcctaaagctatccctcccctctccccccaccccacaacagtccccagagtgtgatgttccccttcctgtgtccatgtgttctcattgttcaattcccacctgtgagtgagaatatgtttggttttttgttcttgcgatagtttactgagaatgatgatttccagtttcatccatgtccctacaaaggacatgaactcatcattttttgtggctgcatagtattccatggtgtatatgtgccacattttcttaatccagtctatcattgttggacatgtgagttggttccaagtctttgctattgtgaatagtgccgcaataaacatacgtgtgcatgtgtctttatagcagcatgatttatagtcctttgggtatatacccagtaatgggatggctgggtcaaatggtatttccagttctagatccctgaggaatggccacactgacttccacaatggttgaactagtttacagtcccaccaacagtgtcaaagtgttcctatttctccacatcctctccagcacctgttgtttcctgactttttaatgattgccattctaactggtgtgagatggtatctcattgtggttttgattcgcatttctctggtggccagtgatggtgagcattttttcatgcagaacacatattcttttcttcagcgcatgtgatactcttcagagttgatcatatattaatacagaaaatgtatcaaaaaatttaaataaaattataccgacgttttatctgactaagatagagtcaaagatggaatcaaactaaacatcagtaactggaggaacttcttttttttttttttttgagatagactctttctctgtatcccaggctggagtgcagtgacagaatctcggctcactacaacctccaccttccgagttcaaaccattctcctgcctcagcctcctgataagctgaaattacaggcacctgccaccactcctggctaattttggtatgtttagtagagagggggtttcaccatgttggccaggctggtcttgaaatcctgacctaaagtcatccaccagcctcggcctccaaagtgccgggactacaggcatgagccaccacccagcctggagaaaatttcaaaaaaatataaacacaaaaattaaacaaatcactcttacatggccaatgggtgaaagaagacattaagaagaaaataaaaaatgtatgaaacaaacaaagaaacacaacataccaaatcttatggcgtttagtcaaatcactattatgaggcaagtttagagcaataaatgcccacatcaaaaagtagaaatatcttaattaatcaaaataacaatgcatgttagagaacttgaagaacaagaaaaagctaaattcaaaattatttttaaaaacaataaagagcagattagatataaatggaattaagactaaaaataccagaaaatattaaaatagcaatagtctttttaaaaaagataagcaaaattgaaagccattagctgggctaacaaaaaaaatataaagagctaagacatgaataaatgaggtagaaacagaagatgtctcaactgatatcccagaattaaaataaattaggaaatactataataaattatgtgataaatgtgaaaacctagaggaattggatacattcctggccatatactacctgacaagattgaaaaaggaaaaaatagaaagccttaacagaccaataaaaagtaatgagagggactcacttaaaaaatctatatcctattgaacataaataaaaaaacccaaattactagcacagcaaatcaaacagcatttaaatactaatactaatactaatacagcatgacaaagtagaattcaacccagggattcaattatgctttaatatacacaagtgaataaacatgatatatcacgtatatacgacaaggatgaaaaacatatttttactttaatagatgcagaataagtactttataaaactcaaaacctcttcatgaaaaaaactctcaattatgtgtagaaagaacaacacaataagaccacatgacaagttcatagctaacatcatacttaacagaaaaaaagtttaatgcttttcttctgaaaactggaaaagacaaggaagccaactctcagcacttattcaacacagtactgaaggtactagccagagcagttagacaagagaaagaaataaaggggattacaattagaaaaaaggtagccaaattacctctaatttcagatgacataatcatatatatactaaagactcttgtaaatgctcttagagctgatgaatttagtaaagtttcaagatacaatatcaacatagaaatctcagtggggtttctatacacaaacaataaactaggtaaaaaaaatcaagaaatcccattttcagtaactacaaaaactattaaacacctaggaatacatttcaccaaggaggtgaaaatccgtaaatgaacaaactatgaaacactgatataattaattgaatgagacaaacacaaaataagaaggacaatctgtattcatgaactggaataatttatattgttagaatgaccataatgcacatgacaatctacatattcaatgtcatctctatgaaaataccaatggcattattcacagaaatattaaaaagcattattaaaatttgtatacaattgaaaataccccaaatgactaatgcagtcttgtggataaaaaacagaggtggaggtattaacaaccagatttcaaaaaaaattataaaactgtaataacaaaaacagcgtagtgctggcataaaaatccatggaaaaaagtagagaaaccaagacattaatccatatatttatagataacttatttgcaacagaggcaccaaaaatatttattgtgaaaagaaaagtatcctcagtaaattgtgtagggaaaaactgaatatccatatgcagatgaatgaacttacattcccacatttaactgtatataaaaatgaaataaaaataagttaaatactcaaatggaagacccaaaactataaagctgctcttaaaaacttagaaataatgcttcatgaaatctgtctggaaaacaattttataaataagacctcaaaagtacagtcaactaaataaaacacaaacgaattaaattttatcaaactaaacagtgtttacacagtaaaataatccaaatattgaatagataacataaaagtggtaaaatgtattttaaactattaattaaacaggctattaatatccagaatataccagaaaaataaatgtctcaaccacaaaaatataaataatcttattttataacagacaattaacccaaataagcagacgtttctcaaagaaacacatacaagatgccagaaaatatttgagaaaaaatgctcaccatcgctaataatcaggaaagcacaaatttaaactacaatgaaatattatctcaccccagacagaatagccatattcaaatacataaaaatagtgctaatgtggatgaagataaaatgggacatgtatacactgttgatgagaatgtacactcatacagccactatggagagacgtatagaagttagtaaaaccacaaatgcaacaatcatatgatacagaaattttacgactgaacatttgtcccaaggacaggaaattaatatattgaagaggaaaatcaatattttgatgagatttcttcactcccatgtttattgcagccctgttcacagtagccaagtaattgaatcaaccgaagtgttcaatataaggtgagtagagaaagatgatgtggaatatgtacataatggaattctacacagccatgaaagattaaattgtgtcactcatagaaacttgcatgtaacatataagactctatgttaattgaaagagccaggaacagaaagctaaacaccacatgttttcactcccataaaatagtcaagaaatatccataaaacataaataattgaaattggacatgaactatagaaacaataattgtcacctgaatatttattttccttcaaataatatataattcaatgatagtaagaagagtcctgataaataaatcatgttgagataaagagctactgaattgtgcattccacactaaatggaaacaatgccataagatccagtgttgtgtaggatctgtttacctttttacctcaaatactacaagtcactcccttgttctaatcaccccgcaaaactgatattttgttgctttatgttatgtcagtaaaaatgattccacattggaagcttcatgtgttgctcagaaatcaccctgttgataaaatgagcacaactacagttacaacctttctgtagatattttctgcatatgatcctcactttttatttgttgtttttgttcacagtttctttaagcactcagagttatatagcatattttcagcatattttaattattttccattgttatggtcagtgctcctgtgggctcaagagtcaggtgttgtgtgactgccagttgacttcactgccacctttacctacacaaaacactgcaagatgaaccatgatgtgtaagaacccatccacaaagtgcttcaaataaagacaaggtgacttgtgtatagatttagtgagactggggaacagttcacggtgttatgttacagaggagcagaaaggtgaatctctctcggagttattgagggtgtaagagctgcagttttggagggtggtgaaaggcacttttgagtgggaagccctagagcatgtgtgaaagctgaaggaatgatcaccatgcacatggacgctgatgaggcatgtggtaaggtccattccctccagatgttcctggatgggcggttgtaggatggctcatgtatatgaaaatgtgggcagggctgaaataggaacaaggccatcatcccacgggaatgcgagaaagcaaaacagagatggacacccatgaagagagctcattagacctggtgaaggaaagataggaatctcttccaaaggctccgctgttcttggctaaatatgaattgtggtgatagactgaaaataaggaggggaagggagatatgactcaagagaggaaaaaccctaagacagcataaaccaaatctacacagaacaatcacatggtagatgccagggtggggctgaaacaggagcttcaatctactgggtacctagttgagatcctttgacatttcttgtgaggtaattctagtgatgatgaatttcctcagttttcctttgtctgggaagtatttctctatccttcatttcataagagatgttttatcaattttaggttcttggttggctgctttttccccccagaaatttaaatccagttatttgctgcataacaaagtttctgccagtaacagatggtggttccacggtgctatacttccttacttatctatatctctttatgtttagatacacaaataattactactatgtttccatggccaacagtattcactacggttgtttctgagtcactggggtgttgctttttctggccagaaccctctgtggccagtggcacttttgcctgagttcttgtcctacatgtggaaagaatgaagtatgcagccatgtggagggtaagcaagacaaagcctagcttcattaagcattagagcatctcagaggagacccccagtgagtagctcctctctgtaggcaggtagactggttgagtgttcagctctaagcagagagggtagctcctccctgcagccggtcgtcctgtggtcttcccagttctcaggagagagggtagctcctccctgcagctggtcgtcctgtggtcttcccatttctcaggagagagggtagctcctccctgcagctggtcgtcctgtcgtctctccatcctctgtcctgctccagctgaggccaggggtttttacggacctccgaggggaggaagtgcaagcccattggtccatgggtgctcatgggtgggccgtaggaagcaccacaagtcccgactctggtctgaggatctgggagccccggcccagccttcaggcccttcctggggacccgcccctgtgcacaggaatcttcctgcctcctgttgtagttcatggtccctggggctccgccctgactttgctccaagatcagagcaggcaccagcagcaggaagaagccaggaagtgggagcaggcacttcggagcatgcaagagcacagggcttttcctggggaccccaagagtgcaggggcgcctgaggccgcagcccccggtttgcggagcagggcttctgccggcttcatggagcgagaggcccgtgtcttcagccgcagtttgggaggctgcagccacagccggggaggcagggctccttcctgttcctcgacctccaagagcacagagtccgagcccactgccctggtttgcgcagctggagccgcacctgagagatgagagctgctgcctgctcctggctcccaccggctccgaggagcatcagcccctccacccctccttgcagcctgggcaggggctcctgatcctctctgggccctggccggcgtccagggcaggagtgacatctccacaagctccccgcattgccccggtgctcagggaggcccgggcagagctgatgacgaccccggcccgtagtcgggagtggcggcctccatggtcaccctgacatgcggctgaaccctggggacgcggcccaagcagcctgcacagaacctcccaaggcccaggaaccccgcaccctaggcggggtgggcacagcggctgctccgctgcccgggttttcaaggaggcgccacttccacttccctccctggaaccccgaagtttgacatgggggctcctttctgccttgctccgcagctccccttcccccggagtggagccccctgtttccctggcgttccctcccacagctgcagtgttctccatcggtgtcatcaccttccagctctgctgccctgctctgcagactaaggctctgattccgtaagagaggggagctgcttcccagtagaaccttgctggggagctctgttcccatctcagttcctgaggggttaaaccagtgcatttaggatactggttttggtggtttgcccctgttgagtaatttcttagttctctagtgggtgtaagagacttggctctggaagcatttcagaagtgtgggctctgatacaccccagacagacactttgggaagggaagatttttgtgactattctcattataagggaaaggcattcaaaagaatagaaaaactctccagtatgtggttcctgagaatttctcactaaaaacatgcttatcacactcgactcaaaacagttcaatgtatattagtgtattttatcttgtactagcctttattgcatttggtgaactctgccccagttcagctcatactctagctttgattctccctacaaaaacttgtctctctctagatttcagatttgttgattgtcttaaaatttcaatgatctgaagtattaaagaaaatttgcaaaagtccattttctctgattaacagttattgttgattttattcttgttgtaaaaaaaagaaattctcatctatgtacatttcaaacctgaataacaaaatttttattaacaccaaaaataataaaagaatccaaatatttatcagctgcctaatagaaaaacaaatcatggtaacattgttcgctggaatattacccatcattcataataagggaatgtctgatacacaaaataagaagataaaattatcaagtatttaaattgagtaaaataagccaaacaaataagagtatgtatgattctatttttaaaaattctggaaaatgaaaactgatctaaagtaatataaagaagattagtagtttcctgggaatatgttggcagaagggaaggagaaaggataaggaaatagaaataggaagtagaaggacagaaaagaagttgagggaatttcacttgtccaccttccttataatggtaatagttatgccatgattatcagttttacactttaaatatgtaaagtttataatctgtcaatcaaatcttataaaatgtattatgaggaaacaagttgaaaattagacaatgtaggagtgacagaaagatagatatgagtatgttgaatgtcagagatacctgaaagtttatctacctgaaccctagttctctccatagtttaaggtaaacaggagagtgcaggaaaatcatccatattctgattaggcagtggcttctgcaaaccacactaggcctggccggctgtgtcctggagttggctaagggaggagtcagggccagtggtgagaagtgcaggcccagataccagaactcactcatcccagacatgagctcttagatacacagagagcccatccatgtgtggatttatcttacatctgtaagtagagaacattgactcttacagaacataatttacacacataggtaaatctgaaataaggtgatcagtgtgaagattttatcacagcacagtttcataataagcacaatttctcaaatcccattgttgtcacccatcttcctcaggacactttcatctgccctgggtcctgctctttcttcaggtgtctcaccccagagcttgatatatagtaggagacatgcaaatagggccctcactctgctgaagaaaaccagccctgcagctctgggagaggagccccagccctgggattcccagctgtttctgcttgctgatcaggactgcacacagagaactcaccatggagtttgggctgagctgggttttccttgttgctattttaaaaggtgattcatggagaactggagatatggagtgtgaatggacatgagtgagataagcagtggatgtgtgtggcagtttctgaccagggtgtctctgtgtttgcaggtgtccagtgtgaggtgcagctggtggagtccgggggaggcttagttcagcctggggggtccctgagactctcctgtgcagcctctggattcaccttcagtagctactggatgcactgggtccgccaagctccagggaaggggctggtgtgggtctcacgtattaatagtgatgggagtagcacaagctacgcggactccgtgaagggccgattcaccatctccagagacaacgccaagaacacgctgtatctgcaaatgaacagtctgagagccgaggacacggctgtgtattactgtgcaagagacacagtgaggggaagtcaatgtgagcccagacacaaacctcgctgcaggggcatctgagaccacgagggggtgtcctgggccctgtgaactgggctgctctccgtggcagcggctggtggtgctaaaggctgattttctctcagcatctggggctgattcatcaagtttcctcagagaacctttcagatttacaattctgtacttacgtttaatgtctctgaatgtgacactttccttccctggtgtgtctttgtttttgtgacaagaggacacattctcacctccacagaagcccgagtgtcactttggggacagaaatgaccctgccctggtcaccagaatcagagtcccgaggaagcccaggaggacctgggaagtgtttttcaatcagactcagggcaggcgtctccgtgggaatctctgattggaacaggctttgggattcagattgggaccaagagggaggctcacccagggccagggtccttagaatcctgacagttttcacagtaaccccatcgtcctttaaaactgaacatctaactcagaactgacccatttggtcctttctctgtaatccattttccttttctctaggcttcattcttacacttcccttttcaccttcattctgaaaatggagggtgtgcttcctgtggtctaaaccacaggcctcagatgcattacctggaactcaggtgtggctctggctatggctcctgtggacctggcaggctgagggatctttctcattccctggtgcctgcatgcccctgctgtcttctatgcgtggatgcatttgggaaatgcaagtggacactcatagtcgtttcctcaaatgggatactgttgtagagctgatcttgtgcttctcaccctgtcacagagcccccactctcacttgtggatttttgggagagctgaggatggacactttattgggctgtgagctctgcatgatggcaatcgtgaggtctgggtgggcacagccagagccaatggagctggccaaaaggaaagacaggacggaattcctgggaagtcctacagctgctgtctaccatagagttccattgtcttctcctctgctaggattaaaccagaccgaccaagttcatctaggacaatcttcctgacctagagaagtgatgacaggctttaataacacctgtattatacatcagagcaacacctagattagtgtttgattgaataattgagactatgtcctagtcaaggtgacacacaaaatcaattattaccatgattaatattttatattgattaatattttaatactaatattaatcaatgcaatattgatttaatattaattaatattttatatttgacaatagaatcagactcatgttataaataattttgcaaatatatgtatattattattggtcttctgagcataaatctccattagccgattaagtgtgcatgcattggtcgaaggagggcatccacccttttgagggaaaatgcatggagggtaaatgaggctgggaagctgatggcatatgatggaagcctgtccctgagtgaaggagagagggaggcaggattgggtggaactttcctacatttctgtgctgtgcaaagaaactccagattatcactgagtctcctgcaagtcaaagttgcccctcaggaaacccccatcactcccagcaatgactctgccccagatgagtgcaaggctcactctattcctgagaaaggagcacaggatatgggatttagcatgagccacgtcatggacgtcagagagcaggagctgggtgcatgatccaagtgcactgttctgcctgtaggtggagagaggaaggtgcattcccagagctaacacactgtggatttttatacagaatacacgttttcacctgatttattggaaggcatatgaaaaaatgtgcagtccacaaacaattgtaatttccaaatttaccacaattgcattatttcttcattctgcatgatgtcctggaacagagttacatttttcatgggtattgtttcatggattgaggacatgaatttcacacctgcctttttagccatgtgcagagaccttgagtagagcatgtctggacctcatctacactatctctcatgccccaagggaaagagtggagacttgactgactgcaaactttggggtgggagctgctcctgcacacctcagaggctgcagagaccccaagtgcagttttattgagttggggtgtctttctatgtgggggaattatgggctgccccactcctggtgattgctggtcagctctaaagacgggttcagaatgaggtcacctggtaacctttctcactgcagctccattatgtaaattaccactaccagattccaggtaataatgcaagctctatttttgcgacctcattttcttatcttttttgttcataagtttggttatagaaaatgttaccacctagtttcctgattcaaatcctataatttgctgaactactcaggatgttttttaatgtgcccagtatttgggaaatataaatgaacagccatgtgtggttcactgagtggacatagtcagttaagtacattagtaaaaacatgattgctgaattgtatagtgaaactacaattagatttgcagaaaattgcctccagtaatgtctgaagggagagccacccagccaatcccgtctctgggcttggaggaagctcactacacaggccaggtcacatgggtgatatccaaggtgcagctcccagcgttactgtgctattttccaggaaccagacatacaacttggcatctcagaagaagatctccaagatttcctttacctggacttcatgggcagcacaggaccagcaggagatgctcagaactcacccaaggcagaaccccagggaagagcaggtgcggagaggaaccagccagggaacctctgaccaccatctagggttgccttcttttccttcacagcatggagccctcaggagaccacccactaggttgtctgtaactcacgtccttcttgtcttgaagcaaaacagacataaatatgaatttgcagttagccccttgaacctgggtcaattttttctgagaatgccaacttaatcgtcaacatcatgggcattatatcaaaatcgagatggatatttagtcaccaggaagacagtttgtctcatggtagaagtgcttattcaattaaaaattacattttaatgaaaaggtctctaagtgaggactgttcaaataataaagtattagtgaagtatcagaaaaataaatggcaccattatctttggtatccagttaatctataaagcatatcaatattcatgttgtaagtggcctaggacaagttatggcagtatttaggctataaggagacattgctttccttcttagataggaatgtccttttttatcatactttaagttctggggtacatgtgcagaatgtgcatgtttgttacataggtatacaagtgccatggtggtttgctgcactcatcaacccgtcatcgacattaggtattactcctaatgctatccctcccctagccccccaccccccaacaggccccagtgtgtgatgttcccctccctgtgtccatgtgttctcattcttcaactcccacttatgagtgagaacatgcagtgtttggttttctgttcctgtgttagtttgctgagaatgatggtttccagcttcatcaatgtccctgcaaaggacatgaacaggaaattccttctaaatgaactgtgttttgacaaatattatccagtgactcttcctacatggggtttctacatgatctatttttcttttccaaaaacaaatcactcaagtttctcatctcctgagtgagaaaaattttccccaaacacaatctcagtctaggtagacaccttcatgaatgagccttcattctcagacaggcacacactgtccccatgtggatgcttctctcagacaggcacacatatccccacatggttgggatcatctgctgggactttgccccatggggatctctattatcactggggcaagttagcacctcgatcctcatccacactgtggcctttgatgtctgtgacctgccacaccctgtctgtccctcagtgtctagaatggtgaagtagtccaccccagggatggaggaagatcccagattttcctgtgaaggagacagaatgccaatcacagagatggaaatctctcacatccctcctgggtcatattctgggcagggtctctgaagtcacccctggatcagtgtcctaagatgtctccctctatttccttgggaagaacccatagaaagacaaataagtttttctattagggcatcgtagaacttgtgctttcttgtgtgacaaatataggtattttgactattttaaaaattagatataatattaagtctaccaaatatgtaaatatataagctttataatgtatccctacagggatgtctcctggaattgagaattgaatatatatatatatatatatatatatatatattccaagataaatcttggtgaacattataaaattgactctaatatttatgttcaagatgatcatttcaaaaaagttttaacaacagagaccagatgtatctttccaccagaaataactgtaaaacacagtgaaattttttaaacatgattttaaggtattttacatcaaataacaaggacagtgattgctgaggtggggaaaatatacaaaaggagccctctgatgaacgcatgctttgctactttttaaagagagtttccaggccacagtgctgaagaggaaccaggtagatttgaagttgaggaaaaggagctgagatcccagacaggccaagaagtgtggagatcacagactagacagtggatagcagaacactgttcagagagtgagccccgtagatggccggagagagacccagccttggtagagtgtggatcagtgtatgggaaccctggaaagttgtacatgagaacacaccttactctagggggcttgccttaaaatctaaaattaccctaaaatttaaacataatcagttacaaattttaaaacataaagaaagacaccatgttaaagaaagataaaggaaaggtggatttgcaatattaaaatataaaaagtgtatttctgaacaaatgataatactgatgaggggggacaagtttattccatcacggcaaatgatttaagagaagaacattccaaatgcttatggccctaatgaggaagcttcaatcacgaatataaatagagttatctcattaccagtgtgatggtgtgagaaacttcaagatttccaaagagacaacctaatctggtaaaaattatagaaacccaacctgtactatcaaggaaaattattctgagaacacacagtaaatgaaatccattgactgacataaagtcctcctgttgactgaagggttatgaccccccacaaggcatatgttggaatctcaactccatcgtgacggtggcaggaggtggggcctttggtctcctttgaaaggtgttgaggctccgtttcatgaatggaatcagcgtcctgatacaataccccagagagctccctctttccttccaccaggtgtggtcacagtaggaaggtggcaatctataaataaagaattgggacatcaccagataccaatctttaagtcatctttatcttgaacttcccagccttgaaaattgggacaaatgcatttatgttatttctgagccacccagtccatgatatcctcttatagcaactcaaacagtcttagcaagtgcagtgaggatcacaatacttgagagaagagcattacctcttctttacatctcaggatcacagaatcttgaccttgggctgaactgacaagaaggtggtgcttccctctcccccagatctcagttgaggtcatgatgtcagatctttatggtggagactaaattcctgcctgtgatttgatggatgcctttctcctcccagcctcactcacaagacatagtttccatgtcaggtgttatagaccaagaacaggtggaccccgattattctcaccccagctcacttgtagggcagaggttctgggagcttcctgggagaggaacagtgagatcatacaagtccatcacttccatgcagttttctgtacttaaagcaggagtgtccttctgagctgcttgaaccctttcttctgcaccaaggtagagactggcatgtttttctagtgatacagtcagggcataaaaacagtgatagaaagctctctctaaagggcgtgaccagatttgcagtagaatgagaatagtttcaaccctaaagttcatctaaaatgttagtggttttcatggtaagtaattaatagaaacctgacagctccatgacagcaatatagaaatcaatagtccactcattttaacagagagaattagaaaacctataatttaagaataaccagctgggcactgtggctctgcctgcagttgaatttacttgggagtttgaggtgagaggatcacttgagcccaggatttcaagcgcagcctggaaacatagctagacttaatttcttgaaaaaaatcagtgctattttggggtcagaacaatcctcaaaaatggtccccggaaagaagcccaaatttaattgcaccagattgttgaacgatttatgctacaaaacagtgtcacatgtcagaaatgagcacagtgtaacatctacatggtttgttaagagacacaaatggtcaagtagaacaatcaggtaattaggctgtcgaaggcaacactgccaaatgacagcatttccgtggaaactgcgtgtacatccaggactgcacctgtgaacgatgacatcatacccttcacagtgtcgaggaaagagacatcactcaaacagacaagccaagggacttcagaaaatataaggggaaatacagtgtgcaaatatgtaaaaaatgcaataagatgattactcctaaatgaatatcaagacacaatcacataatatgaaattaaattttcctgaatgataggattactaccaatcaccccccaggacaccctcatctactctgtgcacagccttctcgtcaggcgtcccagcccagaccttgctatgtagcagaagacatgcaaataagacccccctttttgctgatgaaaagcagcccagccctgaccctgcagctctgggagaggagctccagccttgggattcccagctgtctccactcggtgatcggcactgaatacaggagactcaccatggagtttgggctgagctgggttttccttgttgctattttaaaaggtgattcatggggaactagagatactgagtgtgagtggacatgagtgagagaaacagtggacgtgtgtggcactttctgaccagggtgtctctgtgtttgcaggtgtccagtgtgaggtgcagctggtggagtccgggggaggcttggtccagcctggggggtccctgaaactctcctgtgcagcctctgggttcaccttcagtggctctgctatgcactgggtccgccaggcttccgggaaagggctggagtgggttggccgtattagaagcaaagctaacagttacgcgacagcatatgctgcgtcggtgaaaggcaggttcaccatctccagagatgattcaaagaacacggcgtatctgcaaatgaacagcctgaaaaccgaggacacggccgtgtattactgtactagacacacagtgaggggaggtcagtgtgagcccggacacaaacctccctgcaggggcgcgcggggctaccagggggcgctcgggactcactgagggcgggacaggtcccaggaacaggtgcagcggtaggttttctttctcctcagctggagaagtcaggtttgtgttttcagaactctggagtcttacaggttgctacattttcatacagttattagtatgtatttattatcattggtatttaagttttaataattttaaaccttttatgtagtgttattttttaaaactgtttactttcatttgcagttattcttccagagtttcattaacatctattgctatgagcaactacatagctatgagagcataaatttacacctgtagacgtaggtctaaatgccacaaacctgtgcataaatgtatagtgacttatatttaacattataataagataatttttaaaatatatcctaaacgatcaaacttactgatgaactaaatataaattatcagagtaatgcataattgatttcaataattttatattgtttatattaattaatatctatttctttactgaaacataatatattggtcatttcaaaatagctacgatacatttcaaatggccttgatgctaataatgaaaagattttgaggtgattaatatgctaattagttatatttaattattccatattgtattaatatatcaaaacattgctttgtacctcataaatagatacagtcgtaatttgtcaattttcaagacagttatttaatccatcctgggtcataatctttttttcccctgtccatggctgattggattgtcctgataaacccatccatacgcctgcctcccgcaggcttctgagacgggctccatgaaggccagaagcaggcaccctgtgagagtccacacgacctggagcctccctctccttggattaggccatctcctcgggatcgcagggctcttcattatcctcacccccttgttgtaccaaacaagcaacatcacactttaattcatcacgctttgctttaattttccccccaaaaatcaaggtaataattttagcaataaacatcacaacctactatgagtaagtcctttccaacgtactaaggtttcttctgaggactttacatgtattacacagtttaaatttctttatgaaatgagataccaatatctctatattagagattgtttttctaagtcgtttctgacaattaatttgtccaagggcctgtaaggattctgttagaaatccaggataaaatttgaaatttcagcagtaatatctggaaaaacattgagactatatttaacttcgtacacgtgctctcaaatatccttatttccctaaaggttgttctcagttattattttacacatgatatctataattaatactaataacacaggttaaaatattatctcaattatttaacgacttttgataataacaaaatacatattccacatatttttgaccagtttgttttctctatgaaacacgtgtttattaacttattattatcagatgtcacccttatctttctgatttctgggatttaattctagcaggtatcgtttagtatattttattaattcatattatattgttcacattttcagtatgattttattatttgcattgtttattgaatttgaaactttcttacataattttttaaattttttattttcatgagatgtaatttcaatataagtaataatgcatagatctgcaatgtaccattacaggatttctggcaaatgtaaacacacttgtccccaacagccaaggttggatgtagaggaggcccattcccccagcacaagcgaccttctctgtgcttccagtcagctcccacatttaacacaatgttttgatttctgccactgtagattcactgttcatgttttgattttcatataaatggattcaaacattatagaccccttttctggtaaggggctacttttgttatttttgacgtttatttatgctatttcatatgtaaaattgcatctgtatattgtcatttattcacttaacagactgcctctgatataaaatctcaaagttttgatatatatggataaagagagagggagagagagagagggagaaattttatacttgagtcagtgcatttaacaataaacgacagtaagctgatccatttccctgtcaatgcacttttaatttgtttctggtttattaacatcataagcaaagctgctgcacatattttttgtttttctatttaccttttctcatttttattgagaaagtatgtggaaatatccatttcttcatcataaaagtaaacttcatttgttcagctttatggaactataattgacaataaaattgtatatatttgaggtgcaccacttgatattttggtataaattgtgaaattttcactatgaccaaggagttagcatgtctgttaccctacatttgccattttcttcctttaatttatatgtgtgtgtccaatgagagcacctgagatctatccctttaccagagatcaagtttgcaatacagtgttgatagctatagtcccattgctttacattagacctccagaacccattcaacctgcacaactgaaactttatgcccttgacaagaatcattctatttccactcctcccagccctgggaaccacttttctactctctgcttctaagaatttgaatattttagattccccatataaatgagataatgcagcatttgtctttctgtgtctggcttattccacttagcataatgttctccaggcccatccatgttgttggaaatgttataatttccttatttttagaggtcacataatattccattgtatgtgtatacatttgctttatacacccatttacctacggtcactaactttaaaaaaattctaggccattatgaataatcttgtaataaacatattttttacttactgattttatttcctttgaatacgcagccagaagtgggatcaccagatcacgtaatagttttactttcaatttataaaataacttttactaccactccactgaataattctcttttcaccagctaactgtcagcattttgttatcttttgtgtctgtgataatagtcatggtaatgaacgtgaggtgatatctcattgtggttttgatttggattcccctgatgattagcaatgtggaacacctttccatgtcctgctggccatgcatatgtcttcccttgaatacaatgtctatgtacagttttgccctcttaaaaatcaggggttttttttgctattgtatgggttctttacacatttagatagatccctttgtcagatatatagcttcaagtaatttatttgtctatgattttggtgtcgaatccaaataaatcattttccagatcaactctggaaagcttcttttttccctgttttcttctatgagtttacaattttagatatcatattatatccaagccttgagtacatttttaggtgatttttgtatatgagatgagatgaggtctcatttttttctgcatatggatgctcagtttttacaccatttgttaaaaaggcaatcttttccttattgtgtgtccttggaacaaaaaatctgggagatacacaaaagaggaaaatcttagaccaatattcctgatgatagacctaaaaatcttcaagaaaatactaggaaattgaatatagcagcacattaaaaagttattacattatgatccagtagattttactcctttcatgcaaggctagttcaacatacacaaatcaataaaggtgctccaccacataagcagaatcaaaagcaaaaactatataattatctcaatagatccagagaaactttcaataagattcaacattcttcatgataaaaaccttcaacagactagacatcaaagaaacttagcttaaaatgataagagccatgtatgacaaacccacaactgacaccatactgaatcaacaaaagctcaaatcattccccttcataactggaacaaaacaagaatacccactctcaccactcctattcaacatagtagtggatgttctagccagagaaatcaaacaagagaaagaaataaaaggcatccccacaagtaaataagaattcaaactatctatttttgctgttgataggatcctatgcatagaaaattctatagactctgccaaaagaatcctagaattgataaacaactttagtaatgtttcaggatacagaataaatatacgaaaatcagtagcttttttatacaccaacgacatccaggcatagagaaaaataaatgacacgatcccacttacaacatctacaaaaaaagaaatacctaggaatacagctaaccaaggaggtgaaagatctctacaagaagaactacaacctctccagcacatgttgtttcctgactttttaatgatcgccattctagctggtgtgagatggtatctcattgtggttttgatttgcatttctctgatggcgagtgatgatgagcagtttttcatgtgtctgttgactgcataaatgtcttctttcgagaagtgtctgttcatatccttcacccactttttgatggggttgtttgtttttttcttgtaaatttgtttgagttcattgtagattctggacattagccctttgtcagatgagtagattgcaaacattttctcccattcgttaggttgcttgttcactctgttggtagtttcttttgctgtgcagaagctctttagtttaattagatcccatttgtcaattttggcttgtgttgccattgcttttggtgttttagacatgaagtccttgcccatgcttatgtcctgaatggtattgcctagattttcttctagggtttctatggttttaggtctaacatttaagtttttaatccatcttgaattaatttttctataaggtgtaaggaagagatccagtttcagctttctacatatggctagccagttttcccagcaccatttattaaatagggaatcctttccccatttcttgtttttgtcaggtttgtcaaagatcagatagttgtagatatgtggcattatttctgagggctctgttctgttccattggtctatatctctggtttggtaccagtaccatgctgttttggttactgtagccttggaaacaacaggtaacaacaggtgctggagaggatgtggagaaataggaacacttttacactgttggtgggactgtaaactagttcaaacattgtggaagtcagtatggcaatttctcagggatctagaactagaaataccatttgacccagccattccattactgggtatataccaaaaggattataaaccatgctgctataaaaacacatgcacacgtatgtttattgtggcactattcacaatagcaaagacttggaaccaactcagatgtccaacaatgatagactggattaagaaaatgtggcacatatacaccatggaatactatgcagccataaaaaatgatgagttcatgtcctttgtagggacatggatgaagctggaaaccatcattctcagcaaactatcgcaaggacaaaaaaccaaacaccgcatattctcactcataggtgagaattgaacaatgagaacacatggacacaggaaggggaacatcacacaccggggcctgttgtggggtggggggaggagggagggatagcattaggagatacacgtaatgctaaatgatgagttaatgggtgcagcagaccaacatggcacatgtatacatatgtaacaaacctgcacattgtgcacatgtaccctaaaacttaaagtataattaaaaaaaacaattacaacgaaaatccttaatgtctcttgagtaggtagagaacatatattttatctaagtaacttgctctaaactgcaaaccaaaataagatgattcaataaagtattttgtaaactagtctttagcaaaaaaaaaaaaagaactacaaaacactgcagaaagaaatcagaaagtaaacaaataaattgaaaaaaaaattccatgctcatggaatgggagaaataatattgcaaaaatggcaatattatccttcaatatttatcgattcaatgttattatcaaaataccagttttattcttctagaaatataagaaaagtattctaaaatttgtatgtaaccaaaaaagaacaaaaacagccaaagtaatcctcagccaaaagaacaatgccagggacatcacactatttgacttcaaactctactataaagccacagtaacaaaaactgtttggtacttgtacaagaataaacacatagacaaatgaaatagaatagaaaactcagaaataaagctgcacacccacaaccatctgttttttgacaaccctgaaaaaaataaacaagcaatggggaaaagacaacctagtcaataaatggtgctgggataacttgctagccatatgcagaagatgggaacttgactcgtgactatcaccatatgaaaaagaaaattaactcaaaatggattatagctttaactaagacttcaaactacaaaaagctaggaagacaacctaggaatactcttctctgcattggccttggcaaagaattactggctctgagaccaggcattttttgtaacagtgatttattttctggggtacatatcatggagtgggattgctgattgaacgatagatctattttagttgcttgataagcctttacaatttttttcacataggttgcactaatttacattaccaacaacagtgtataaatgcattttctctgaattctcatccatatctataattttttgacttcataataataggcactttgactgatgtaaagttgtgtctcactgttgttttaatattaatttatctaatgattaatgttgttcagctttttatttccatatgctttttggccatttgaatatcttcttcacaaaatgtctgttgatgtcttttgcccacattttaatggtgtaatttatttatttgttgttgttgctgagttgtctgtgttcttgttagattctagatgttagttatttattgcacagtaatgtaataaatctaaaagtcaggaaacaacaggtgctggagaggatgtggagaaataggaacacttttacactgttggtgggactgtaaactagttcaaccattgtggaagtcagtgtggcgattcctcagggatctagaactagaaatatcatttgacccagcaatcccattactgagtatataccatcccatgactgggtatatacccaaaggattataaatcatgctgctataaagacacatgcacacgtatgtttattgtagcactattcacaatagcaaagacttggaaccaacccaagtgtccaacaatgatagactggattaagaaaatgtggcacatatacaccatggaatactatgcagccataaaagatgatgagttcacgtcctttgtagggacatggatgaagctggaaaccatcactctcagcaaactatcgcaaggacaaaaaaccaaacaccacatgttctcactcataggtgggaattgaacaatgagagcacatggacacaggaaggggaacatcacacactggggcctgttgtggggttggaggggcggtggggagggatagcattaggagaaatacctaatgttaaatgatgagttaatgggtgcagcacaccaacatggcacacatatacatatgcaacaaacctgcacattgtgcacacataccctaaaacttaaagtgtaataaaaaaaataaaattaaaaaaatcaattgcaaaaaaactgttgaaactatgaaaatatgaggtaattaaacaacacaattttgaccaatcattggctcaccaataaaattaagatattaatttttaaaaatacaaagaaaaatgaagccacaacataccaaaccctctgagatacaggaagagcagtactaagagcttatagttctaaatgtctatgaaaaaatagaaagattataaactagcaatctattgatttacttcaaggaactagatattttagaacaaaccaaccccagagctagaagaagaaaataaataaagatcatggcagatttcaaaaatattgaaacaaaaaagcaaaatataaggaatcaacaaaacaaaatgtggttattttaaaacatgaacacaattgatagagcactaactaggtcaacaaaaaaaaaaagacagaagattcaagttagcacaagcagaaatgataaaggtggtattataactgacccaatggaaatacaaaagattatcaagacatactgaatatgtctatgctcacaaactagaaaatctagaggaaatcaataaatttctggaaatattcaactaccccccaaaattgaaccaggaaggaaaagaaatcctaaatagaccaatgcgagtaataagactgaatcagaaactgaaaatctcccaaccccaaaagcccagaaccagataaattcaaggtctaattttaccagatgtaccattcttactggaactattccaaaggattaaagagaagagattctttcccacctttgtctaaaatactcgtatcacctaataccaaaatcaggcaaggatacaactacaacaacaaaaagctacagggaaatatccctaatgaacatagatacaaaatagtaaacagaatactagctagctgaaaccaacagcacaataaaagataatacatcatgaccaattgggttttattccagggatgcaaagcttgtctaaaataaacacatcaataaatatgattcaacatataacataattaaaaacagaaaacataagaccatctcaatgaatgcaaaaaagtcattcaataaaattcaatatcccttcatgaaaaattcctcaacaagcttagcatcaaagaaacctacctcaaaactataaaagccacatacaacaaccaacaaaaaactcttaaataaatcaatagaacagggatcttcttaaatttagtaaaaacctatgcaactgatttattcaatatgctggacttggtagtgaagaaatgaatgactttaactaaaaaaaaaagccacatataacaaaacaacattatatggaatgagaaaaagttgcaaaaatattcctgaagaacgtgagcaagaatgcacactttcaccactcctactggacgtattactgaaagtcctagccagaataatcagaaaggaaaaaagaaatgtatgtttcaagttccaagctaaggaatccaggagtggcagacccagagacttgttttttaatctatgaataacatccaaacccctgaccgatcccttggaacacaggatttaggggtgattgaggctctttcttttgggttaaatgaaagttgctaggtggagggtgttaagtaaaaattactacataagctgcatagttttgtcaaatggttgtagttttcttgtccagcctgctgttcctgaaccaccctatatgaaagccctcaataaactatatgtcttgttcactggtttggcctgttgtacacgatgccagtcctattggagtccatattggtctggcgtgacatccagtcaacctggtaaaaggtccaaaaaaaatctcatgagcacccagacaatggaatctaaaaagaggagacccctgcagaaaccttgggcaggctgttaatttctacgtggggcccaacagccgttatccatgatggatggggcccagtgcctgagtatggggataccgccacaatgccaaaagttctggaagaacctcttcagtgggtgcatcttacaaagtgaaagtcagatgtccaggctgttgcattatcaggtgagtggttcttcctgactgcactctgagaagccactgagacagtgctcactgtgtatgctacagtgtgtcagtcacaagaagagctactcctagaaaaacatgccagactagctcagactaatcagagacctttctgtcctgcctgtggaagcagaatggcaaattggggaccgccgcttgtggagcagcacatttgaaggatttctggccatcacatgaattagttacggctgtgatgactaaactgtcatgggaccctaagacctagttcccataaagagttctagggggaggaggatgaagtttggggtaagcccatgggggttcctgtcctctctacacatctggtggctaccaccaaggtaaaaatgggccaactgcaccagcagaggcgagccccagagacatttcccacctgaaataaggaaacacaccacaatgtgggattccaccactgcggaattgctgacacttagaaatgggttcagacagaagaagagagagttgatcacagggtggcttcttcatctgtgaggcatgcgggaggagggcattatactccctgaactcaagattagtaaagtgacatccatcacaaaccatctgggcctgaggcagcacctcgatggtgtcagtcatggagattggaccatccctctccttagctgggtggttgcagactgcaagggaccctggtgaaacgagggagatgtccgctttattagtgtgttctcgtattgctagaaagaaatacctgaaactgagtaattcacatagaaaataggtttaatttactcatgattctgctggctgtatgggaagcatgatgaaaaatctgttcagcttctggagaggcctcaggaaatttacaatgatagtgaaaggcaaaaggggagcagccactttatatggtgggagcaggagcaaagaaagagtgagggtggaggtcccacacactgttaaacaaccaaatctcatgagaactcatttactatcatagcaaggggaccgtgctaaccattattcataaatccggacccacgatacaaccaccgggccccgcctcaaacattagggaagcaaaatcacatacagttgttatgacaggtgggacatcctgaaaacctctctaggcatgtcccacacggccctggagctgtctcaggggagcagtctcctccagtgtttagacgcacaggcacggataatagggctaagtctggccagatgtgtgatattcaacacattgcacaactgctctgttctgtatgtaatttatcttctctacaaatgtaacattgatggttgcattaaatatattctgcaaatatgtaaaaataaaataagatgatgattgctaaatgattatcaaggcacaatcacataatccgaagttacaatttcctgagagataggattactgcccatgcttaccaggacactcacatctgctctgggcactgccttctcctcaggcgtcccaccccagagcttgctatatagtaggagacatgcaaatagggtcctccctctgctgatgaaaaccagcccagccctgaccctgcagctctgagagcggagccccagccccagaattcccaggtgttttcatttggtgatcagcactgaacacagaggactcaccatggagtttgggctgagctgggttttccttgttgttattttacaaggtgatttatggagaactagagatgttaagtgtgagtggacgtgagtgagagaaacagtggatttgtgtgacagtttctgaccagggtgtctctgtgtttgcaggtgtccagtgtgaggtgcagctggtggagtctgggggaggcttggtccagcctggagggtccctgagactctcctgtgcagcctctggattcaccttcagtgaccactacatggactgggtccgccaggctccagggaaggggctggagtgggttggccgtactagaaacaaagctaacagttacaccacagaatacgccgcgtctgtgaaaggcagattcaccatctcaagagatgattcaaagaactcactgtatctgcaaatgaacagcctgaaaaccgaggacacggccgtgtattactgtgctagagacacagcgaggggaggtcagtgtgagcccggacacaaacctccctgcaggggcgcgtggggccaccagggggcggtcgggaaccactgaggacgggacaggtcccaggagcaggtgcagggggcggtttcctgtcagctgcaggaggcgggtttgtttttgcaggactctggagccttatgaggttgcactattttattatggttatttatcatgtgttttttattgatatttgtgttttagtaatttttacatttatatgtaggggtattttttaaaaatacataacttcaagaaataattcttcctagtaatttacacctattcctctaaagttttattaacacctgttgatatcagcaactacatagctatgcaacattaatttacatctataaacatatgtgtgaatacatgaaactatgcatacatgtgtagtcatttatatttaacattataataaaataataaattaaataaaataattgaattaaattaaaagaattaaacttaatgatgaactaaatataaattagagtaatccataattgatttcaatccttctctatggtttacataaatcgatgtctacttgtaagcttaagtatagtgaattggtcattttaaaatagccaagaacaaatttcaaatgttcttgtcaccaaaaaatgataaggatttgaagatttgaggtgatatatatgtcaattagctcgattcaattattccacattgcattcataaatcataacatagctttgtaccccatcagtatatggggtacaaccaaaatttctcaatttccaatgaaattttaattatatattttttaatttgatgcctctctttggatcaggccacctcctcaggattacagtgctgttcagttttctcaacatgctgttgtaccagataagcacaaaacatttaatttcattatgctttgctttagtttttcaaaacaacataaaggtaataattttcccaacaaacatattacagcctattctatacttttttattttttgtttttatgagataaaatttacatgtaagaaaaaatttatagatctgaaatgtgtcactagagagtttctggcaaatgtgaatacccttgtcccgaacacctaaggtagactaaagagcaagtccatacccacaacatgcgtctttctctgtgcctgcggtcaacccctacatggggaagtgttttgatttctgacaccatagatccatttttttctgttttgagctttatataaatggaatcaaacattatagacctttttttggtaagggactactttgctattttttaggttaattcatgctatttaatgtatgaaattagatcatcatagtgtcatttactcaattaatgggctgactctgatatgaaacctcaaagtattcatgtatatatggagagagagagagggaggaaggacagagattttatatctgagacagtccattgagtaaatatatgacaatatattgatctatttgttgtcgatggattttacatttgtttccagtatatgaatattataagcaaagctgttacaaatacattagtgtaagtttttctatctatgttgtctcaattttgttgagaaaatatgaagtatgtttttctttattgtaagaggaagtttaatttttttcagttttattgaggtaaaaataaaatattttttaaaatgtataggtttaaggtgccccacttgacgttttgatgttgtattagtccattctcacactgctataaaaaatgcctgagactgagtaatttgaaaaaaaatatgtttaattggctcacggttctgcaggctgtacaggaagtgcagtggcttctccttctggggagagtcaggaaagttaggatcatggcagaagacaaaggggagcaggtgtgtcacatggccagagcggaagccacaggaagcggaccggggtgtggggggactgcacactgttagacaactagatcttgtgagaactcaggcactgtagtgagaacagcaccaggagtcggtgctgaaccactcatgaaagacccaccccacgacccagtcatctcccaccaggtcccaccccaggactgaggattataatataacatgagatttggtccaagacacagatccaaaccatatcatatgcacattgtgaaatgctcatcatggttaaggtaatttgtatattcatcttctcactattttttgtttgatttttgagacagagttttgctcttgtcgtccaggctggagttcaatgtcaccatctcagctcactgcaacctccaacccctggattcaagggattctcctgcctcagcttcccgagtagctgggattacaggagctcaacaccacaccccgctatttttttttttttttggtacttttagtaaagacagagtttcgccacgttggccaggctggcctcgaacagctgacctcaagagatctgtccgcctcggcctcccaaagtgctgggattacagatgcaagccacagcgcccagccaattttattattttaaaaatgtactgcatgtgagtgtgtgcgtgtgtgtgtgtttcatgagaacacctaagatctacccttttagcaaaaatcacttttacagtacagtattaaatacaggaaaattggcgtaggttagatctccagaactcattcaccctgcacagctgaaactctgtaccctctgaccaacttcacccaatttccctctcctcccaggtcctgggacccactattctactctctgctttcaagagcttgaatatttcagatcccacacgtaaatgagatcatgcagcatttgtctttctgcatctggcttattccactcagcgtcatgtcctccaggcccatccatgttgcaaaagccagaacttccttcttttcaaagctaaataaaattcagttttatgtgtacacattttctttaaacattctttaatctatggtcattaaactctttcacaaatctacactattataaataatctggcagtgaacatgtgtttaacataataattttatttcatttgaatatataacaagaagtgggatcaccagatcgtacgataactttatttttcaatttattgagtaacaagtcctaccacaccatatcatgatttcctttcccaacattcttgtgaacacttgttatattttgtcttgctgataatagtcattttaagtggtttgaggcaatatttcatcgtgctttagatttgaatttctctgaaaattagtaatgttgggaacctttttaggctctgtttttcatgagtgggttttctgaaaaaaagtctatccaggttttttcccttttatcaggtcgtttgtaatttgcacatagttttttttcctgtgcttttggtattaaattcaaataaatcatttctgaatcaatgacaggaagtttttccatgctgtctatgagtttgtggtttcaggttttgctcatttttagttgatttttgtacatggtgtgagagaaggtctaattttatttcttctgcatatggatgtccagttatacatcatttattgaggagactgtctttcttcactgtgtctttttggcatacaaaatcaggaagagacataattaaaaaagaaaatattagatgaatattcgtgatgaacatagacctaaaagttctcaacaaaatattagcaaatagaatccagaagcactttaaaatgtaacacatcatgatcaagtgggctttaccctgggatgcaaagttcattcaacatccacaaatcaataactgtgattcattgtgtaagcagaataaaagcaaaaaccatatgttatctcaatagatgctgagaaagcttttgatatgctccaacactcactcataataaaaaccctcagcaaactaggcatcaaaaaacatacctcaaaataataagagccatctatgaccaacccacagtcaacattatactgagtgagcaaaagctcaaaccccatgagaattggaacaagacaaggatgccctctcaccactcctattgaacatagcactgaaaatcctagtcagggcaaccaggcaatagcgaaaataaaacgcagccgatatggtttgtactagtgccccattcaaatttcatgtcaaattgtaattcccagggttggggctggggtctggtgaagggtgattctatcatgaggatgggtctccgtctcttgtgctgctctcgtgatggtcctcaggagatctggtttcaaagtatgtgtcatctccctcctctctcttcctcctgctcctgccctgtaagacatgatgcttccctttctgtcatgattgtcatgttcctgaggcccccccaagagccataattcctgtacagcctgcagaaccataagacaattaaaaacctttatacattacacagtctcaggtgtttctttagagtgtgcgaatggactaatacagaatcaaaataggaaaagaagtcaatgtatctgtccaaattgatgatataattctatacctagaaaattctaaagactctgccaaaataattctagaatagataaacaactttggtaaagtgtcgggatacaaaatcaatgtacaaaaatcactagcatttctgtaccccaactacatccaagctgagagtgaaatcaagaacacaattctatcccacttacaatatccacaaagaaaaggaaatgcctgggaacacagataacaaataagatggaagatccctgcaagatgaatgacaaaacacagcagaaataagtcataaatgacacaaaaaatgggaaaacatttcatgctcatgattggaataatcaatattgtaaaaattgtcatactgccaatagaaatttacagattcaatactattcacataaaactatcaccatcattcttcacagaattagaaaaaaaagtatatatattctaaaagttatatggaaccaaaaagcccctgagtagccaaagcaattctaagcagaaagaaccatgacagaggcaacatgatacctgactttaaactacaccataaagtcacagtaaccaaaacagcttggaagtggtacatgagcagacatgcagaaaaatggaacaagagagaaaacagaaataaacctgcacacataaaccatctgatatttgataaggctgacgaaaacaagcaatggggataaaactctgtattcactaaacggtgctgggataactggattctgtcagatatacagaatgcaaaagtgaaggaggctgggcagcttcgacttagatttcagaggatatgtagagggccctgcaggcccagcaggaggccggctgcagcagtgcagccaccacagacagcctctactaggacagtgccaaagatggggaaagagagggttggagccccaattcacaatccccactagggcattttacactaaagctgtgggaatgtggccacgaccctcaaggtccctgaatggtagaaccaaaggcagcttgcactctcagcctggaaaaacttctggtactcgactctaacctatgaatgcaggccaataagctgtgctcagctataaggatgaaaagcctgaggtttctgggactccttcaacccagggtgccctggttgaagtacatcaagtgaagcgagattattttgtagctttaagatttaatatctgcccagacaggctttaggtgtgtggggggcctattggccattcctttggacatttttttccttttgtattaacaatatttaaccaatatctgtggcagtcttgcatgttggaagtaaataactctttaaaacattttgccagctcatagctggagggaaattgccttaagactcggataagactttggaattttcagttggaggttgaccaagttaagacttttggaaactattaaaaaaaaagatcattttgcaacctctgaaggacgtaagatcagggggcacaagagtgaaatgatatagtttagatgatggtcccctccaaatctcatggcgaaatgtgctccacaatatttgaggtggggccgactgggagattttgggacatggggaaaaatccttcaggaatggctcaataaccaccctatggcagtaggtgaattattcctgtattaactactgggagatctgattattaaaaggagtctgatgaccctcctcccctctcacgtccacccctcaccatatgacaccgcctgcttcccctttgccttccaccataactgtaagcttcctgaggccctcacaagaagcagatgctggtgccatgctcctcacacagcctgccgaactctaagccaaatgagcctcttttatttgtaaattacttggcctcaggcattaatttagagcaatgcaaaatagactaaaacacactgcccaaagcaatatacagagtcaatgcagtttccatcaaataaccaatataattaagtacattttttttaaatgtcctaaaatttatatggaagcaaaaaagagccttttgattccatataatagcaaaagccgtcctaagacaaggaaacaaagctgaaagccccacattccctgacttcaaattatactacacagttataggaagaaagacagcacggtactggtaccaaaacaaaacaaaaaatattagaccaggtgtgcctgtaatcccagcactttaggtggcagaagctggtggatcacctgaggtcaggagctcaagaccagcctgaccaacatggtgaacccctgtctctagtaaaaatatgaaaaactagccaggcctagtggcccatacctgtaatctcagctacatcggaagctgaggcaggagaatcacttaaacccgggaggtggaggtttcagtgagctgagatcttgccattgcactccagcctgggtgacaagagcaaaactccatctcaaaaaaaaaattaatgtaacagaatagagagcccagaaagaaagccaaatatctacaaccaactattctttgacaaaactgacaaaaatatacactggagaaatagtcctctattcagtaagtcgtgctgggaaaattggatggccactcatagaagaataaaaccaggcttctatctcaccacagacaaaaagtaactgaatatggattcaataattaaatgtataaactgaaactataaaaatacttgaagaaaatgtagggagaattctcgggacattggcctaggcagataaaatatgactaagacttcaaaagcaaatgcaacgaaaacaaaaatagatgaagaggacttaattgaactaaagatcttctgcagagaaaaagaaataatcaacatggtgaacaaacagcctacacaatggtagaaggtatcacttcatctcagttaagagggctcttatcaaaaaagaaaaaaaacagccaggcgtggtggctcatgcctgtaatcccagcactttgcgaggccgaggcaggtggatcacttgagatcaggagtttaagaccaacttgtccaacatggcaaaaccctatccctcctaaaaatgcaaaaattagctgggcgtgttggccagcacctgtagccccagctactcggtaggttaaggcaagataatcgattgaacctgggagttggaggttgcagtgaggtgagatcacgccactacactccagcctgggtgacaggagtgaaactctgtctcaaaaagaaggaaggaaggaaggaaggaaggaaggaaggaaggaaggaaggaagggagggagggagggagggagggagggagggagggaggaagggaaagaaagaaagaaagaacgaaagaaagaaagaaagaaaaagaaattaagaaagaaaaaaattaagaaagaaaagaaagaaagaaaaagaaggaaagagagaaaaaagaaagagagagagaaaaaaggaaggaaggatggaaggacagaaggagggatagaaggaagaaaaggaaaggagaaagaaagaaaaaagagaaagagataaaaagaaataaagagagaaagaaagaaaactaacaaatgctggtaaggttggggagaaggtaaactagtacagtcagtcactatggagagcagcgtggaggtacctcaaaaaactacaaatacaactaccaaacgacccagcaattccactactgcaaatgtatccaaacgcatgaaaataattatatcagagatttcttactcccagtgtatatggcaggacctttcacaatggccaagatatgaaatcaaaccaggtgtcagagagcagatgaatggttaaagattatgtggtgcatatacatgatgagatgctcatcatccacaggaaaggaaatcctgttgtttttggcaatgaagacggaactggaggacattatgtgaaatgaaataaaccaggaacttcaagtaatacaccttgttttctcactcatacgtggaaggaaaaagaaaatttgtctcatagaaataaatagtagaacagaggatactagagtctgggaagtgcaggggaagagataggcagagatttgtgaaggaatacattagagttaggtgggaggaatagattataatgttctttaccactgtgggataaatgtatttaacaattatatgtagtttcaaacagttagaagaaggatattgagtgttcccaacaaaaagaaaatgtttcagatgacggatatattaattatccttatctgtcccctacacactgtttcacaacatcgctatgtacctcatgaatatttacaatcattatttgtctattaaaattatattagaaaacacaaaattcactggaagtaacataaatggaggctctgggatagacctggagataacggagggtctgggatacattacaggcctagcactcaatggtcagaggagctcccattagctttttgtatttgtagcactgagtaaatctaacatttctcaaagcttccctttgcaatagagacgtgaggcctagggagatcttgcagatagtcagatatgcagagggaagaagcaggggtagagggttgctggcccattcaacaatagttggaatgataattacgcatgtagagaagccaacattgatttaaataagttgcatcactgaaagccatgaaaaaaaatccaaaggaaatctttaaataaaattgagagtgaaactgttttgggtgaagaaatgttcactgaagttaggtgtgccagtaaagctgttaagaactacagtaaccactggattggattcagctttgtctgaattcagtgtgattattactggctcaggcaggggtcagaaatcaacatggataggtggtagcaacacgaaaaagccagggaccagaaagattcacagccgaattttttcagatgtataaagaagtgttgctaccaatcctagtgtaactatttcccaaaaatgaggataaaggtctcctccctaaattattccatgaagccagcattattctgataacaaaacctggcagagacttaataaaaaaacatgactttagaccaatatacctgatgcaaaaatgctcaatgaaatactcacaaactgaatacagcagcacatcaaaaagcctaacctaccaacactttgttcctgggatgcaaggttggttcaacatatgcaaatcaggaaatgtgattcatcacataaacagaacgaaaaacaaaaaccatgttaaccggcagggcacggtgactcatgcctgtaatcccagcactttgggaggctgaggcgggcggatcataaggtcaggagctcgagaccatcctggttaacatggtgaaaccccgtctctactaaaaatacaaaaaaattagctgggcatggtggcgggctcctgtagtcccagctactcgggaggttgaggcaggagaatggcgtgagtccaggaggtggagcttgcagtgagccgagatcacgccactgcagttcagcctgggcgacagagtgagactctgtctcaaaaaaaaaaaaaaaaaaagaaagaaaacgttaaccatagacacagaaaaggttttgaaaaaactttaagattctttcatgttaaaaaccatcaaccaggcatgaaggaatacaccacaaaataataagggccatctatgacaaactcacagccaacattatactgactgagcaaaacctggaagcattttcccctgaaaactagaacaagaaaaggacacccattctaaccactcctgttcatcattgtcatggaagtcccagccagagcatgcaggcaagagaaagaaataaaaagcatcaagtcaggaagagagggtgtcaaactatccctgcagatgaaatgatcacattcctgagtctgtagtttggtgactgacattaatttaaaatattgtcagtcatcattgtttaaatatttcttcttagcctttctctatttttttctatttcccattatgtgcatgttatacctctgtcactgtctcaccattcttgggtaagctgttcttcttttgtatatatgtgtgtgtgtgtatatatatatatgtatatatgtgtgtatatatgtatatatatatgtatatatatgtgtgtatatatgtatatatgtgtatatatgtatatatgtgtatatatgtgtgtgtgtgtgtctgtgtgtgtgtatatttgtatttgtgtgtttactgttctaacaatatattttttgtttttgcttttcagtttgggaaatttctattgagatagttttaagttcagatttttgtccgcagctatgccccatctacatataagtccattgaaagcattacttaattctgttacaaaattcttgatatctacttttttttccttttttggaatttgcttcattctacttgcatgacacagctgttccagcatgctgtctgcttaattcattacagaccttagcatattaatcacagtggtcttaaattctttgtttggtaattccaaactaaatggcatggctgaatctcattttaatgcttgttttgtcttgtcacactatgatatatttcttttagtatatatcatgatttttatagggagaaattatgtatcaggtgaaagaaactgctgtaaagaggcctttagtgatatcattgtaagttgtggagagaaacctgtttcataatcctctggccatggcttcatctaggaagcttaaggcctttgaaaataaatccttacatgaacgtgaaaagataagccacagatatggagaatttcctcacaaatcaaatatttggaaaaggacttttatcaggaataataaaaattaccttacagttgaatgacaaaaccacatgatctaattttaaaatagacaaagacctgtatagaaagaagcctcatctaaaaataaatataaaaagtgatcagcatgatttttaggtatatgtatgtttaatattcaaaaaatactatatcctgttagaatgggtaaaatacacattttagacagtaccaaatggtgatgaggaagttgaaaaacaggaacattcactccttgtgggtgggaaggggatgctgaagaggcacatacacaactacagttagtactttattgtatatttcagaatagctagaagataagatttagaatgttcttaacacaaagaagtaatcagtgatggaggtgagggatatcccaggtatctggatttgatcattgcagataacatgcttttatcaaaatatcatgcgtatcccttaaaggttttgaactgttatgtatctatataaattaaacatttttaaaaaaacggtgcaggggaatccagctaattgcagattcccattagatgggatgtgctgcataatctgtaaactaatcagagtctgtgggtttgtaaaggactttagaaatcaactggactacttgtttctaaagataagtctcgcaagtttaattattttcttaatgggtggcgattttgaacatagaagaaatgttaacagttgtttctcaagttttcttctagtttcagaagaaaaggtttgcagggaggaatctgggaccatctttcaagtctcaacttcaatgtgattatctcagtaaatattttctgatacccctgagcagggtaagtctcatatatgtcctagaaactgcaagtagaattctaggcaccccaactgactgaagggaacttttctcttcaacgaggagttccatggacactagaaaacctagtttaggccgtgtcagaaatggaggatcagaaatccctcattataccctcctccctttggaattcaagcacaagtaaccagcattttccttaaaacagatttaaggctcagaaaacagattccgtgtagcagtaaaacaccaaattctaacctgactcaagaatagcatcacatgacagagaaaaggccttggaaggaatcaaagtcttttaccctaaaatatatgtctttgacatatttttaaatcaccctgcacagttatctttttgcaagagaaatttacattctgtagagaatcgcttccctttgaaggtgtttgtgttatactgaggtatcgggggaaattcagccagatactgggagaaattcacccccgatatttcacgtagattcttttctattttccttaagtgtcagccggtctgagaaataaagggacaaagtacaaaagagagaaattttaaagctgggtgtctgggggagacatcacagttcggcaggttctgtgatgccccctgagccgcaaaaccagcaggtttttattagtgattttcaaaaggggagggagtgtacgaatagggtgtgggtcacagagatcactgcttcacaaggtaatagaatatcacaaggccaatggaggcagggcgagatcacaggaccacaggaccagggcgagattaaaattgctaatgaagtttcaggcacgcattgtcatcgataacatcttatcaggagacagggtttgagagcagacaaccggtctgaccaaaatttattaggcgggaatttcctcgtcctaataagcctgggagcgctacgggagactggggcttatttcatccccccgctgcgaccgtaaaggacagccgccccccgaagcggccattttagaggcgtttagagcgtttctgtcttctctcccagtttctacgagttcctccagtgcctgtaacacagagctgttagtggctttgcccctgcctgttaattctttggtcatgtaatggtggtgagggagctgggtctggatgcatttcagccacagctgctgttccacttccccacacagaaccatctcgggaggaagaggttggagatttttctgatgtgtcctcaatcctggcagaaaaggtttcaatagcaataggattccctcagttgtatgtcctctgataatttaaacaataacttctttattatactcaactctaaacggtctaaagagtatgtctaagttaaccctgcattcgcttatatgacatttgctctaccccagataaggtcatattctctttctgtttgttcctgcaagtcactgactttcacaagatgtaaggtcccttgtttgtcctataacatcaataatctgatgttttaaagaaaatatgctaatttgcagctcagtaagtttagttgtaaaaataatacatttttttctgagatgcctacatctccatgctgagttggagctttatttgtaacactcagaaactggaaataacaaaaatattaaggagctttataaatagtacgggcacactcattaactggaattctgttcctcattacaaggaacatattctttatacacaaccaaactactgactcacaagtaattgtgctgagcaagaagccacacaaatgaaatggaaactgtaaggtttcactttaaccaaattttgaaaaatagacctgaagtagcaaacatgagagactgactcagtgtagtgagcggaaaatgactgggaggcaggaattagaggaaactagggaaaccttgaagtgtaattcattgttatcttgattgttattttggatgcacaggtaagcacatgtgaaactgcattttttcctttggagacatggtcttgctttgtcatccaggctggagctcagtggtgagatcatagctctctgcagcctcagaccctgcgtctccaccaatcttcctccctctgccatacgtagctgggactactggtatgtaagacaatacttggcttcagtgcttattaaaatgcacactttaattaagcagtatttgttatacagcaatcatgcctcaataagagtattgcaaataagtggatagataatttgttcaataaagattgatggaaagatagatgctaacatgagaaaatgcatgacacccaagaaaataacactgtaggaaacatgcttttctttacaattgttaggtaatcacaacagagcatacacatcacaccatgttctcgttacagagaaaaggttctgcaaacctcactagctgcaacccctgtgtgctgggcttggttcagggagaagtcaggtccagtggtgagaagcacaggcccagataaccaagctcactctgaccgaatgtgagccctgggtacattgtacaacccatctgtgcttctgctggtaatttttcatctgtaacatggaaatgacattgatactatataccatgtttcctctgcatatgtaaaaataaaaggtgattggtgctaactttaaatatacacagtttatgtacattgattgcacctcaatacaacagttttaaatagatattacaacattataagttttataggtttaatattttatcacagaacaaactttcaataagaaaccacaatttccaaatgctatcaatatcacaaatctcccccaggacactctcacatgctctgagccccactctctcctcaggcgtcccatcccagagcttggcatgtagtaggagacatgcaaatagagccctccctcggcttatgaaaaccagcccagccctgaccctgcagcactggaagaggagccccagccctgggattttcaggtgttttcatttggtgatcaggactgaacacagaggactcaccatggagtcatggctgagctgggtttttcttgccgctattttaaaaggtaattcattgagaactattgaaattgagtgtgagtggataagagtgagagaaacagtggatttgtgtggcagtttctgaccagggtttctttttgtttgcaggtgtccagtgtgaggtgcagctggtggagtccgggggaggcttggtccagcctggggggtccctgagactctcctgtgcagcctctggattcaccttcagtgactactacatgagctgggtccgccaggctcccgggaaggggctggagtgggtaggtttcattagaaacaaagctaatggtgggacaacagaatagaccacgtctgtgaaaggcagattcacaatctcaagagatgattccaaaagcatcacctatctgcaaatgaacagcctgagagccgaggacacggccgtgtattactgtgcgagagacacagtgaggggaagtcagtgtgagcccggacacaaacctccctgcaggggtccccaggaccaccagggggcgccagggacactgtgcacggggctgtctccagggcaggtgcaggtgctgctgagggctggcttcctgtgatggtctggggctgcctcattgtcaaatttccccagggaacttctccagatttacaatcctgtactaacatttcatgtctctaaatgcaaaacttttttgttctttctgtatttttgtttttgtaacaggaggacacattctcgcctccacagaagccacagtgtcactttgggggcagatgatccttctgtagtcagcaggatgaaagtgcagaggaatctcagtggaacctgggaagtcttttccagttagactcagggcagagacctccatgggaatctctgattagaacaggctttgagttctgataggagccaagagagaggctcacccagggtcagagtccttaaaacctgacggttttcacagctatctcacctcgtcttgaaaaactgtgcacatctgactcacactaattcagttgaccttatttctgctaatctattttccttctctgcagacttgattctcacagttccctttcttcttctcttgcctgaaaacagaggatgtgttttctgtagtcaaaatcccagagatcaggtctgcaggacctgggtaggctgaggggactttctcactcaccatagcctggtgacactcctgctgtattttgtatgtggaggtgtttggaaaacgaagtgaacattagtcatgaagggaataatactagttttctccaaagggatgtggatgtagagctgatcttgtgcttctcacactgtcacagaatttatgctctcccctgtgactttaggagagctgaggatggacactccattgtgctgtgagctctggtaatagtaattatagggtctcgctaggcagcctaaggtcaatactgctggccttcgggaaaggcaggctgggattcctaggaaaacctgcatctgccatccagcatggagtcccatcgtcttctgttatgctctgattgaatcaggcacacctaggttatctagaacactcttcgtgacttgggaaaaattagtggcaggctctactaagacctgcattatgccatgggagcaacacctaggctagtgtgtgattgagtaggtgagactatggtctagtcaaggtgacagggaaaattgttgccattattatgttttattttatatttggcaatatagtcatgctcatattacaaatatctttctacattttttgtgtcagaagcttttgaacaagagcaacttcatcttgaatagaggctaggaaaaataagactgagacctgctgggctacattcccagtaagttaaggcgttcttagtcacaggatgagataggaggtctgcacacgatccaggttataaagaccttgctggtaaaggttacagtaaagaagctggccacagcccaccaaaaccaggatggcaaaaaagtgatctctgttcgtcctcactgctcattataatgccttaacatgctgaaagccactcccctcagcgccatgacggtttacacatgccatggcaacatcaggaaggttccctagatggtgtacaaaggaggggaggacacctcagcttcgggaattgcccaggggactcatgaataatccatccgttgtgagaaatacattcatccctttgagagaaaatgcacagggggtggaatgaggctgggaagccgatggcacatggtggaagcctgtccctgagtgaaagagagggggaagctggattgggtggaaggtccctatatttctgtgctgtgcaagggaggggcaaaatataattgagtctcttgtaagtcagtgtttcctctcaggggatccccatgactcccagaaataatggctctgcttaggaatccctgcagagtcactcctttcattagagtagaccacaggacatgggcctcagcacacgccatgccacagatgtcagaaagcagctgctgggaacctgacccacctgcattttgctgcctgtaggaggagggagggacgtgcattctcagggccaacacactgtttttggatttttatagagaacacctgcttttactttattttttggaaaaatatatgaacaaatgtgcacctgcaaacaattgtaattttcacatttattttaattgcatttgtttataattgtgcatgaggtcctggtgcagagttgagtttttcatgggaattgttccaagaatcaagaacatccattttccactttcactggtttttccccatgtgcagagaccttgagtagagcacatctggcccttatccacactatctcttgtgtccccgggaaagagcagggatttgcctgactgcagaatctagggtaggagtctgcacacgtctgagcctgcagagaagcccagtgaagtttaatgaagtcagagagctttcccgtgtggggaacctctagcttcctcactctcagagattgctggtcagctgtaattgaggggttaagaattagagcacctgggagcctgtctcatcacagctccattctgtaacttaccaccatcagactgcaggtaataactcaatcttgatttttctgaccccatcttattcatttgtaagtttggttatacaaaatgttacattttagtttctgattcaaacctcagaattttgtgaattcatcaggaataattaaaaatgtgtccagtttttgggaaatgtaaattaatgtccatactgtttatgtgtgtgtgcgtgtgtgtgtggggggatatgtcagtcacttacaccccagtaaaaatgattccttaattatatagtcgaactgcaattagatttgctgaaaattgtctacagtaatttctgtgaagctgaccttgccaccttgctgtgaggatgctcagtgcacaggtgaggtctcacaggagagatccaaggttcagcccccaggactggctgagctcctggcttggagccagacataggactgggcatctcagaagcagatcccctggccctcctttatctgggctgtatgggcagcagaggacaagcagaagaaactcagaattcagccaagacagagccccatttaggagcaggtgcatcaaggaaccagccagagaacctctgactacaatctagggttgtcttcttttgcttcacagcatccagtcctaaggagaccacccactatatcatctgtaactcagaactttcttgttacaaaggaaaacacaaatgaatataactctgcagttaacttcttgaacctggattgatgagtttccacggccttatgagcacagagaccacatccagtgcaggtgcagagcaaggctgcaacagtcagcctgctgctccctcaggagtcttccaattcccttgtccaaagcatccgctcattcatgggctgagaaaagggaagtcattcatgcagtctactctctccacagaactgacggggcacaaggacaacatcgatttttcatggaacatgcctctaggaatgcagctgtgtgcacacacactgctaagcacacacttctttacataattacttgtaactgtattttcttatttattctctccaatttttttacacaaattcatcacttttccccataatcaaagaggattttgatcagaatgcttgtggggagccccttgccccccagatgcccaccatcattattcttgaagggaggaggaacggcagctctcttgatttctactctaatcctctaggactaaaaccagaaggttgcatgtccggtgcgggagcatcgaagaagatcctgtctgtagaagcaggagcgtcaagacttgactgagagccatggtgctgaaatgagatagattccctgatggagagcacacgtggacccccacacctgagggctcactgctcctcaccacagatgcactcccctactgagtcctgagacctgagtgcaccccatagagtagggctcagatgaggggatgcaaatctccaccagctccaccctcccctgggttcaaaagacgaggacagggcctcgctcagtgaatcctgctctccaccatggacatactttgttccacgctcctgctactgactgtcccgtcctgtgagtgctgtggtcaggtagtacttcagaagcaaaaaatctattctctcctttgtgggcttcatcttcttatgtcttctccacaggggtcttatcccaggtcaccttgagggagtctggtcctgcgctggtgaaacccacacagaccctcacactgacctgcaccttctctgggttctcactcagcactagtggaatgtgtgtgagctggatccgtcagcccccagggaaggccctggagtggcttgcactcattgattgggatgatgataaatactacagcacatctctgaagaccaggctcaccatctccaaggacacctccaaaaaccaggtggtccttacaatgaccaacatggaccctgtggacacagccacgtattactgtgcacggataccacagagacacagcccagggcgcctcctgtacaagaacccaggctgcttctcagtggtgctccctccccacctctgcagaacaggatagtgtggctgagatgccatttcctgccagggcctgcgtttcccatccccatctgactcagagccttgttttcctccctcttctttactaataaatggcatgtcccctgttagtggttcatgcaagcagaagctgtatcctgtttgacaaagattcagcatgaaaggtcctgctacctaaaaaaaaatagacagatgagacttaattaacctaaataatttttttcacaacaacagagtgaatacgcaatttacagaatgacagaaaacttttgcacactttgcctgtgacagggaactaatatgaagaatttgcaaggaactcaaacaactctacaacaacaacagcaacaagaaccaaataactccgttaaaatgagcaaaggacatgagtagacattttcaaaagaacacatagaaatggataataaatatataaacaatactcaacatcactaaccatcagggaaatgcaaattaaaaccacaataagatatcatcttccaccagtcacaatgactattactaaaaactcaaataatatcagatgttgctgaggatgggaaatgaaggcaactcttagacattgttgatgaggatgtagatgagtacaacctctgtggaaaatggtatggagatttcccagaaaactagaaatagaactgtcatttggtccagcaatcccactactgggtaactacccaaaggaaaataaactattatttcaaaaagatacccaccttctatgcttaccataaaactactctcaatagcacatatgtcaaactgagtgtctgccaaccgatgattttataaaagaatatagcatgtatgcacaattcaatactagtcagccacaataaggaatgaaactgtgtcttttgcagcaagatgcatagaagtgggggacaatataattagtgaactaactcacaaacagaatgtcacatgtcacacattattacttgtaagtgggaggtaaacagcgtgtacacaaggatttgtagagagaaattacacacattggagacttacaaggatgggcgggcagaaggtgggagcatgatgagtcattacataacaggcacaatataaaataattaagaattgaccaatgatcttaaaattaaaatgtagaatatgatcaataaatgaacttgatattagttgacctcattaaatttaaaaactttttctactcaaatgactgtaagaaaatgaatgcccggttacagatgagaaactgtttgcgagtcaaataaccaccaatgtaactataataagaaacttcagaactcaactgtgaataaaaaagaaacaactgatggataaattaggcaagggtttctacagacatttcgtcaaagaagatgtgcagatgacactgaagcatataaacaggatctcaacaggattttccgttagagaaattcaaatcaagcccgcaaagagacaccactgtacactttttaaaatggctgaaattaagaagaaatacagataacatcaatgctggtgagcataccaggttgctagaggctaaaacattgctaacaggaatgcaaaatgaaacagatactcaggaaaataatttttagttttctctaaaatcaaacatacccttaacacctgaatatttgcatcagagaaaaacaatcttacattcacgcataacttctattcaaatattcaagatatcgtgtgtatgtgtgttagaaagtaaaaataacataaatgtctcaaaatttgaataggtgaagaactaggaagcatctataaattgaataccaccagcaataaaaaaataacaagtgaccgatacataaactattacaggtgaactccagacattgtgctaagtgagagaagccagtctcaaagatcaaagggacacagctgtaagcaccacggtcatcctcaggtgtcagtggtttgggctggactttctgtgtctctttcctgaccagacccagatattgagctccaccacttgcagatggaaaatcctattttcaaccatgcagtgaggtttgaactgcttcacagactgaacgaaacaaacacgggctcctttgaacagcgtccggcatttgttccaaccacaagagaacgtccctcagctctcccacctcctcggttctctcctgcaagccagcagccctgcagtttagcctgcatctcccgtgcatccacccatctccctccaagcaccttcccccacaccctccactgtttctgagagcacaggcaggctttgaacttttccgcattctgttgttattgaagttaggatgtttaggaccaacttaaggatcatattttatgactgaattccagtgccccttctctcctgggacagagtgcataaccaagtttctgcaggtggagacgaagttgagcttttttcttcctcagcctaggagatgagcgctaattggagggttgggcagaagcttcccaccatcccagcactttggttctggtggggcggaatcggtgccatagggcagagctagaaaccgcggactgaatgttcccagtggcactggacccagggcagagcctccatccacgagtggggctctatggaagaagtgagtctctggctctcagtagctctcgtccagcactgaacctcagcatcatgtgctgtgtgcagggtcagagggccaacgtactggcccctgggaaagcgtttcctctggtgggagttggtagaaggtgtcctgtcttcttggctgcatctgtccgcagtggagtttacatcatgctgagctgggatgtggaaggaaggaagagcatcttagatcaaatatgatgactggccttactgagttttctagattttcctgaataaatgtttcttcactcactgtgtgctgttagagtctttccaaacctgtaatttcccaaaataattttcactggtctcatgagggcatggattcattgagcccctcatgctgtcaaagagaaatagaactgtttttttttttcacttcatagcgaacatccatgggttatcaaataatgggctggcttttcttccaacactttacagacaccatcaattttcttcttgcttataaggttttaaccagaagaatgctgtcatggtcttttctgttcttttggaaggaatgccccctctactcacctccacttgtctgcctgtatttctatttgtctttggttttcaacaattttaataagatttacctaaatgtgtgtggggggagcatggggtgttattctgctgttctgtgttctctgagatgcatggattcaccatttactctgtctccatttttgtgaaaacaattagaaaaaaagtcagtatgagcccagaaacaagcctccctgaagtgggcacaggaccacctgggggcgctcaggacccactgaacacaagagccagccccagggcaggtgcagatgcgggttaagttctggtttcctgtcaaccctgtggcttcctctccataaaacagtttcctttgtggcatatctctggattccttatcctgttcttcctgtgaagtctctgaagaagaaacatttgtcgtaacaagagaaaaactttctcacatgcaccaaaggcagagtcacctacagtcacttactcctgtttctcaatgtcaataagttaccaatgcttctgaagttaatcagctaaatctataaaaggtgcggtgtttaactcagcattacagcccagctcaacagaactccaaaggtcagccagcagcagccaggaaaaagtgcatgctgggcattggggcagagggagttaccatccagtgcaagtagccttataattaggtgaacttcggaatttaatcttcagttgtgttaaataaaaaaaaaaaacacaatctacaatttaggaaagtgagagtttatttttatcaagggttacagccatcccatatcctggaaagcatagctcttggtaaagacgagagaaaggcactcccaggaagaaggggttgggcagaagctttatgctgaagggtttggctaaacagacataatcaacaggttacaggaggggctatagatgttcatggaggtggtcctgacacatgcatactgaacaaacatgtctgtaacatatgacccctgttcacttaccagtggagccttagcatttaaattcattccagtgaggccctatgtgcaaacagcacaagcagagacacaaaggcactcagtgtgcagcttctgtaaacggccagagccaggccatggtcagtggtcttggatcaggagaaagttcctgatatcactctagtgttcaatcaaagctggggttatggtttgcggaacagggggtcagttcatcagggggtgggctgcaattgtcttcatagtgcttgtctcagtgccggtgcttactgagccactagagaaaaaggtttaattgagcttctttaaaatcaacattttgaatgatttatcagacatttcaaatatgtcatgttgtttagattctattgctggagagttaaggtgatatttggggttttgtgactctgttttttcatacttcctgaattgcttatctgtttgcttttcattagctaaactatcgcttcttcttattttttaattcattctgattttgatgaatatttaattccctttagaatgtgaatataatgtacattgtgtgggtattttgattttggttcttggtttacttagtggcaaagactctgtaagagttccttgtctatagatagccattatttagtggctttctgaaatggtggttttagtaccaaagtactggacttgtgagtaggctcactgcccgctgcaggtcctagatagtggaggcctcaggaactgtttctcatttggaatgcctttgtttcagcagattttgtgttgggttgttaagttcaccctccacattagtagatgtcttacagattagagctgactctggtagaagcagttgagtacatgcttgatatctgtgcacagggagaagctctctgttgcctcaggcgatggactggtctatgaaatgcacagtgacctgagttccctgctcagcccctgagaggtggaccaagctggacacacatgagccaccgagcctggcaagcaaaagcgccagccttgatggaaatggcgagctgaggggcatctactcagtgtggtttcttttgttattaagagctttagtgtggtggctttttcaaattcccgttgtagtggtaatatactgggtatgtgagcaggcccgtggtcttttgcggggttggaatcaccgaagtaatgagaagctaatctcattttcaactgctgtacactggtggtattgagtttgtatgaggtcatgcagtttgaacgtcaggccagtaggtggtgctcgcaggtaagagccggctatggtggcagcagaagggtttatgctttaccggtggttaaagtgggaaacttgtcgtgttccagatcttagagaaaagacttttagttatttctcattcaacctgatactacctgaaagtctctcgaatgtaacttttattttgtcgcgatgggttctttctatacccattttttatggtttttttatgaaaggatgttgtttcatcaaatgcgttttcagcatcaattgaaaaaaattatatgttgattaaagatcaaaatgtataacctaacactataaaacctctggataataacctaggaaacagaatttaggaggtaagaactgacaaaggttttataatgaaaatgctagaagtagttgcaacaaaattgaaaattgacaaatgggacctaagtaaattaaagagcttctgtacagcaaaagatactatcaacagagaaaacaggcaacctacagaatgggaaataaaatatttgcagcctatacatctgacaaaggtccgatacttagtatatacatggaaatttaacaaacattcaagaaataaaaagtgaccaaaggacatgaaaagacacttcaaaaaagacctacatgtggccaacaagcataggaaaaagtgctgaatatcactatcattagagaaatacatatcaaaacctcaatgaggtaccgtctcacatcagtcaggatggctaatcttaaaaaaaaaataacagatttttaaggttacagaaaaaaggggaaatttatacacttctggcgggaatataaatgagttcaaccattgtggaaagcagtgtggtgatccctccaataacctaaaacagaagtttcatttgacccaacaatcctacaactggacatatacctaaaggaatataaacatgtaggttcactgcagcactatccacaatagcatagacatggaatttacctaaatccccatcactggcagaatgatagagaaaaatgtggtacatacaaccatggaatactatgcagctaaggaaagaatgaaactatgtcctttgtaggaacatgatggaactggcagtcaatactcttagaaaactaattcaggaacagaaaaccagatattatatattctcccttatttgttggagataaataaaagcaaatattcttccagggcctgagtcttccttattcaacaagtcattctaaattaagtgttcagcaagttgctgatactcatctaaatattctatttcatctgggccacttacatcactcaaaaagcaatgagagctatatttctaaggggggttctaggataataaatacctgaatagtgagaatatgaaggatatggaaactgggccacttatatcactcaaaaaggaatgagagctatatttataaggggggttctaggataataaatacctgaatagtgagaatatgaaggatatggaaactgggccacttatatcactcaaaaagcaaggagagctatatttctaagtggggttctaggataataaatatctgaatagtgagaatatgaaggatatggatggtttttttttaattcaatgggcacataactgtgggagacactatattcctatgaagaaggtattcagacttcagagataagtaaagtttcctacgttgtgtttgtgacttggaagcagtggattgaagagtgtgataggtgcccagaccaagcggaacagaaatcaacatgtaaagatgatgatctatggatatgatctaaaaccatgaaaatacttcaaataattctatttaatgcagtttgaaataaaacacaaacttattcaaaatacaaattacttggtaattattttgggagctatgagttcatcaagaaactcaaattcctatttctacttcaacccctgattcctactgtcaatgggagggaagtctcagaaccaatcacacatcagacggcaaatctgtcaaccaagagtctttcccttgaaggcctgggaggtcaggaccctcaggaaagtgctggggactctgtcttgggagtgtccagcagatctcagaactctccatgggtcctgctggacactcatgtagggtaacgagtggccaccttttcagtgttaccagtgagctctgagtgttcctaatgggaccaggatgggtctaggtgcctgctcaatgtcagagacagcaatggtcccacaaaaaacccaggtaatctttaggccaataaaatgtgggttcacagtgaggagtgcatcctggggttggggtttgttctgcagcgggaagagcgctgtgcacagaaagcttagaaatggggcaagagatgcttttcctcaggcaggatttagggcttggtctctcagcatcccacacttgtacagctgatgtggcatctgtgttttctttctcatcgtagatcaggctttgagctgtgaaataccctgcctcatgcatatgcaaataacctgaggtcttctgagataaatatagatatattggtgccctgagagcatcacataacaaccacattcctcctctaaagaagcccctgggagcacagctcatcaccatggactggacctggaggttcctctttgtggtggcagcagctacaggtaaggggcttcctagtcctaaggctgaggaagggatcctggtttagttaaagaggattttattcacccctgtgtcctctccacaggtgtccagtcccaggtgcagctggtgcagtctggggctgaggtgaagaagcctgggtcctcggtgaaggtctcctgcaaggcttctggaggcaccttcagcagctatgctatcagctgggtgcgacaggcccctggacaagggcttgagtggatgggagggatcatccctatctttggtacagcaaactacgcacagaagttccagggcagagtcacgattaccgcggacgaatccacgagcacagcctacatggagctgagcagcctgagatctgaggacacggccgtgtattactgtgcgagagacacagtgtgaaaacccacatcctgagagtgtcagaaaccctgagggagaaggcagctgtgccgggctgaggagatgacagggtttattaggtttaaggctgtttacaaaatgggttatatatttgagaaaaaaagaacagtagaaacaagtacatactcctctaattttaagataattattccattcaagagtcgtaatataagccagattcacagagtggaaaaggccacactctataaagttgatacaaacattccatgaaggtgctactgtgaacaagttttcaaattggatgaatacatgatttggagcaaggttatttgatcatgtggtgagactaagaatgattcttaaaaagtgccaaaagtttccttcaaatgtttctgtcactccttatcataaagtttattttacagcagttttaggattacaaagaaattgcacaggaggcgtgagaattcccatgactccctgccctacacaggcacagcctcctccactacgaccatcctgcaccgcagtcacaaatcagttacaatggaggaatctccaaggacgcttggttctttctttttctggtgatctcctaatataacaagcctaagtatctcaagattccacggttttttcagtgttttctagaactgatattagtcagagggaaagtgggtaaggctattactatttgaactctttcttccaaaatccacaaaatatatattaatttagagcttatcttacttctggtttacaatgctccttcccagacagtaagatttttttaagcttttagaggccagttcatgtctctaaaagaccagaaagttctggggaatcccataatgaacatcctttcatgagaattggagaccctggcaatgagagactccatgtataatgccctagagttggattagatgctctgtaagctcttgggtggtgagtctgagtaagggggtttgtgcagcaaacgcaaacacatgcatgggacccaggtaggaacaaaagcttccctctacaaagggagtgtgcacctgaagcagccctcacagaggtgggcactgctcacccttgatgagtgcacattagccagaggcatgatcatgattggtcttgcagacaaagagcaccactgaggtcataggttatgaaaatgtttgtcatcctccagctgagcaagtccatctgcttgtttgtgggtgtcaactccatggagggtgcactttgggagatgacaagatgcacacaaacctcctctcactaattatccactaccacacactcaaaacaaccctgtgctccagaaagggatacgtgcctgccgaaacaaacagagcttaagggttttattacctggtaaatatactgcccaaagccacacgtttcaggaagattagctcagaaatgttcaccaattgactgaagggcagtggcgggtgaggtgatgggacagcctcagggctgcacatgaggagggctccctcccccatgcaggcttttctccaggagcttcaccaggaactcaagggggatcagggagaattctgagaacaccctactgtggagctgcctagagaggaagaataaatgatgaaaaataaaactctgagtaacgtatgggcatttgttaatgaaaactgtttttctgaaagcttgtgaaggtcttgaaatgcccctgagtagctgagggcaaatatttaaaccctccttccacagggagttcaagcaggctggatgtgtccttctatggatgatcttccccaaccccttcctcttcccagatcatccctggctctctgtgtaaacagttctcatcagtgtaatgtgattgatgaagtgaggtcttcaatttcctcatcttcttggtggtcatgttattttttttcatctgagggttaaaaactcacctgcatgcagcacgtgacagcctaaaatctcttgtggacaaaacagtaacaaaggcacccacgagggttgagcacccgtgttgctgacagcgacaaccaggggtcaacgtcctctccaaaatcctgtgtcagagcatcactggaatgatttcattagcaacttcccaggagaatcagcttaaaaaatacttgtcccattttccatgcagatataacccatcccttttcctgaagaaacagagctcaatactaaatacactgaatgttgtttttgctggttttgtaagtttgtgactttatcactttctaatttctgagttaggtggaccactctacatatttctctcatgggtgtgaccagccttctggatgtcaaatataactgactttgttcgtgtaaatgtcaacacaagctcttcatggtttcggtgctcactgactactctaaacttacacatgtgtttctttattagctttgttttctggtgtctctacttggcttattcatcatgtccattttgtgttatttctacaggtaatgattgttatttttaaaatttactgttgcttactttaattaaataagaaggcaatagcttagaatagaaaacaaggtaaagtaaaagtacatgcagtaatatttaatataagtaagcaggcagctgaaagcaagggaaatctactctgctgtgtaaaagggtatggagacctcatagtatgatgatcttctgcagtttaatccatactgctacataagtgacagcatccactctgtttatatcagagctttccctaatatgtataatgaagactgagcccaggtacctccaaccagactgaccagcaccttttaccaagtgcctgaactgacagcaatagagatcacgtttgtctaaaaaaaaactcacactgtaaggatacccaccagtcatatggagacaatttgaaaaaattaaagcccaagcctgataggtagtaatttatacttagaagaattaacttttatctccacatttttttaatcatagagaaactactagagtcactgtccaagttactgaatatcttattccctagaatgagacattgcacaatgtgttctgacacgagggaatgtagctgtagttaagggacaggagatgtgatcacgggaacatgagtctgcgatccagcagttcttgctccttcacatttgcccagaaacaaagaccccagcagaacaatggaagcattgacttaggtctccacagtctgatgtgagataaacagcaggtagtttatgcctctgttttatagcaggaaatttaatctctaaagaagggccattttgaggataatactattctccaggatgcttacatgcccccaaacagagagcactacagtgccccctggccaggagctacaacacctgggtctggaaaccactggacagaaatatgagtttctcttaccacatgtatgatggaaatttgaaaaatgtttccttccttccccataatcataggctgtgatggactggaggtcccagtacataaaaaaactgtgtctgcattggatacagaattagtctcataaaataattgtgctacggtggtgcccacactgttggaccagcggaccgagaaagtgttgtaagagctgcagtgtctactgattcctatcatatttggggctacattcacatctatcaagggaaagagagataagaaaatctctctaggccgggcgcggtggctcacgcctgtaatcccagcactttgtggggccaaggtgggcggatcacgaggtcaggagatccggaccatcctggccaacatggtgaaaccccgtctctcctaaaaatacaaaaaattagctgggcatggtggtgggcgcctgtagtcccagctactcaggagactgaggcaggagaatggcgtgaacccggcaggcggagcttgcagtgagccgagattgtgccacttcaactccagcctgggggacagagctagactccataaaaaaagaaagaaaggaagaaagaaagaaagaaagaaagaaagaaagaaagaaagaaagaaagaaagaaagaaaggagagagaaagagagagagagaaagaaagaaagaaagaaggaagaaagaaggaaggaagaaggaaggaaggaaagaaagaaagaagaaagaaagaaggaaggaaggaaggaagaaggaaggaaggaaggaaagaaagaaagaaagagaaagaaagaaagaaggaaggaaggaagaaggaaggaagtaaggaaagaaagaaagaaaaagaaagaaagaaagaaaaagaaaagaaagaaagagagagaaagaaaatctggcctagatagagtctacatatttattttcatttcttcaaatgaggtaaaaaaatcgcatcaactaaaatggggacgatgatgaagtgatcaaggacaacagccactcagtgtttcaggtgtgttttaacccaaagtcacacaacgtgtgagaacctgaactccggagccaggggcatctctgaggagaatgtggaaggtgggcgggaggaaacagtgattcatgtctagggaaatttcagggctgcctgctctaggggaaaggaaagcctgagcctctcccacagtgtgctctgttaaaattgttgggtgacttattgtattcttcgacacaaatatttttgtttagtcctctcttaaatttttttatctctattaaaattctcactttgttcttgcatgctgccactagcttactaaacatgtttctaatatttacttcaaattttctgccagaacatcaatatgttttatattcattgatgccagattctggacctctatgttgtctgtctgtttggaccatgttcccgtgtttcttcattttccttgacggtctttcttgctatctgttcatcataacaaacagctctttgctcatcataacaaagagccacactcttcaaagactagggtcatagagaccaccctcaccaatcaccccagtcaataagtgtggatctctcaaaaattcataataacttcataatattcaaactgctgcctctgttcttagtggcccccaggtttagagaacattgggttgtgccaggactcccaagtaggagaggtagaaactatttactcaagcagactcttgaaaaggtgtaccattagacacagttttattattgagttatgattcatcaaaataatgttagttcaagtttctttcaaccagtcatctaacattgaaatgttataatttcttacttggatctctctggggtttatctttgggatatttaggtaaaattacaaactagtataaagctgcctacttgacaaaattatctgctgcagaattttcatcttccatgtatctgtttttgcacctaaatctaagtttttattagtcaagtatccagaatatagaaatatgtcttaaagttccttcacttttttttaagtttatggggtttccagaagaggtgagaacgttctttatatataaaatacctgattccacattgctggatagtttcttctttaatttatctcctcctctcacattatactatattaagcaaggagaaatcaaaacacaccatccacactttgctagaaatccccaaagctaaattttaagtatcacttactaattctaattttacccattgtaacttaattaacataaaatctataacaaggttacacatactttcccgttctaataccatgttcgtgacagaaacaaagcaggtgtcttctctgcaatgtggtcatctgaggtctgagatgaggggtcacacaggtattttataatatttaagggtttggacaacagtagtgataacaattctgaacagcactggctcctaattgaaaggttataggtaaatttaatgctgcaattttatattaacaccttgtccgaatgaagctcagaggaagatgccacatcccaggtcacacagtgaggaggaatggagctgcgctctgctctccacaccacctacaaatcccaggccccagcccaggttccactggcgcacggcacctagagcacagttcccaggggatgatctcagggcacctgcttcctcgggcagggcgctgccttctctcaattgtgcacttgctcctcctgcaggttctgtagtgagcacttgtattgtcgtgatttatacatgttctctcccctaatatggaaaaaaatatttattaaattttcaactcattttctctgatgcacactgcattagcagaaaggaataaatcacatttcctatcctcccataaagccaaagattcccgaagacagactgatgtgatgtactcataggtggatctctgcccctcaggggaggccttggtcttcaagtttcagtaattctaggaagcgaaggacacctacatctcctgctccctgctctgtagctcacctgagaacagctttctcattggaatgtcttgtgtttaaggaataagagtccatgtttcaggttcgggagcccaggtgcacctactggatgcagcccaggattggagacactttccagaagacaacatcacctgagacatgaccagtcccactgtttcactttcacaatttcaacttcctcagaagaaaattaaaattgctgagacttgttcataagtgttctgccatgtccttactctgttttcttgcctgttcatttatgtcataccaggtgcctgttatacgtaataagatcagaattctgcctccagtaacacatcaatggagacctttgattgtacttttggtttatgcactgacacatagattatgatgttcatcacattcatttttatgtcaaaggaaatctgcataatctgaatgccaatactttttggaatctgctaagtaactgaaattgaaaaaaaaatacccactcaagaacctggatagacagccatgtccagaatggcagttgacacttgtttaactggaagagaatctacagaagccacaagttgttgagggcacttacatgataagcactatagttgtcttaaagacagatgtggactcagtaaatgtgactgttccagagggtcttatacttctatgttttatggactttctcaccagaaacctccagattctaaaaaatactatccaaatacatttcctatttgtcagatcggagaagattaattactgaaaaatattacgggagactttttcaaaagcttctacatggaaggacttttcgagaaccttgtcctatgtaaaggaagacaattctcccattccagatttctctcccattcttccattattatacacatgagcaaagttagccaataggggtaagatgtaagtaaatagtccaggggcactgaaaccacaaaagggagtaatggccaaagtagcttttcccctggagattcctggtcaaagtcacagcccagaagaggaagccgatcgcgtctctaggtttccattgtcaaaacaggcagtgcttgcctgcactgcacaatccattctaaccagtgtgatagctctggattaaagatggaagtgtggcaatgcacagactctatgtgagaagaacactggaaaactaaaggacaaaggcagagagtaggacaaggacgacaaagcaatctgaagcctctgacatcaccatttttaagatcaaggtcttggaaactccctcattgacctttagatctctaggagaaaaaagtcagatacctgggcctagtgtcagtgtaggaggaattttctataggctaggcattaggaagaagggaaaattcttccttattaggaagttattgttatagtgttatagtgttattggaatagtggatatggagcgggctttcatctcgatcaatctgcacctgctggtattttccaatgctacattcacctgcaagagcccaatgaagaaagaaggcactcccaaatcttttgcaagtttttgtattcactgtgggtccactgcttaagtgcatctggaacttcagagaaggggctctgtcctgtgtcatagaacccttgctttgagtctcatggcagagttcaatctgtttagtaaagttgatcaattatttcaagagatggtgtcaccagcatatggtgtcactgagggagtattctacactagcacacagccatttcacgctgggctagagaagctggggggaaatgctttgtgagccccaacaagaacctccttgcaaggcaagggctgggcgggagggggcactcaggagccattcagcacgggttccagccctgcagctggtgcacaggaggctgctgagaaggtttcctctcaggggctgggtcttcctttgggagaaaaaagctaaaattcaataagttgctggtgtgcccttaaatattctatcacatctgagctgttcccacaattcaaggcgatgagaactatccttataaatattctatcacatctgagctgctcccacaattcaagaccatgagaactatctttataaatattctatcacatctgagctgctcccacaattcaaggcgatgagaactatctttttaaatattctatcacatctgagctgctcccaaaattcaaggcaatgggaactatctttttaaatattctatcacatctgagctgttcccacaattcaagaccatgagaactatctttttaaatattctatcacatctgagctgctcccacaattcaaggcgatgagaactatctttttaaatattctatcacatctgagctgttcccacaattcaagaccatgagaactatctttttaaatattctatcacatctgagctgctcccacaattcaagatcatgagaactatctttttaaatattctatcacatctgagctgctcccacaattcaaggcgatgagaactatctttttaaatattctatcacatctgagctgctcccacaattcaagaccatgagaactatctttataaatattctatcacatctgagctgctcccacaattcaaggcgatgagaactatctttttaaatattctatcacatctgagctgctcccacaattcaaggcgatgaggactatctttttaaatattctatcacatctgagctgctcccacaattcaaggaatgagaactatctttttaaatattctatcacatctgagctgctcccacaattcaagacaaggagaactatctttttaaatattctatcacatctgagctgctcccacaattcaagacaaggagaactatctttttaaatattctatcacatctgagctgctcccacaattcaaggcaatgagaactatctttttaaatattctatcacatctgagctgctcccacaattcaagacaaggagaactatctttttaaatattctatcacatctgagctgctcccacaattcaagaccaggagaactatctttttaaatattctatcacatctgagctgctcccacaattcaagaccaggagaactatctttttaaatattctatcacatctgagctgctcccacaattcaaggcaatgagaactatctctttaaatattctatcacatctgagctgctcccacaattcaagacaaggagaactatctttttaaatattctatcacatctgagctgctcccacaattcaaggcgatgagaactatctttataaatattctatcacatctgagctgctcccacaattcaaggcgatgagaactatctttttaaatattctatcacatctgagctgctcccacaattcaaggcgatgagaactatctttttaaatattctatcacatctgagctgctcccacaattcaaggcgatgagaactatctttttaaatattctatcacatctgagctgctcccacaattcaagacaaggagaactatctttttaaatattctatcacatctgagctgctcccacaattcaagaccaggagaactatctttttaaatattctgtcacatctgagctgctcccacaattcaaggcgatgagaactatctttttaaatattctatcacatctgagctgctcccacaattcaagacaaggagaactatctttttaaagtcggcttctaagattataaataccttaatagtgagaatatgaagaatagggatggtcttactaattcaatgcagagagaattatgggagtcactatatttctatgaataataatttcagatttcaggctggggctggtggctcatgcctgtaatgccagcactttgcgaggctgaggtgagggggtcacgaggtcaggagctggagaccatcctggctaacaccatgaaatcctgtctctattcaaaatacaaaaaattagccaggtggggtggcatgaacctgtagtcccagctactcgggaggctgaggcaggagatttaatcctacaagacctacagcctcagacaatgctgctggcagtgatcgtgggaagcagagtttgcagtgagctgagattgcgccactgcactccagcttgggcaacaaagcgagattccatctccaaaaaaaaaattcagatttcagtgttaagtaaagttgcctacattgtgtgagtgacagggcagtggtggatccgagagtgtggatctgagagtgagtcagaaatcagcatgtaaagatgaggatctatgcacatgaactgaaagtatgtaaacagttcatgaaattctaataaatccagtaggaaataaaacccaaacttatccaaacacaaattcccttgaaattattatgggagcatgagttcataaagaactcctaactcctgtttcaacttctgaatcctagtgtccatgacataagaaaatcatctccaattatgcatcacagggcaaatctgtaaactaagagtttttctgttgacgatcctgaggaatcaggacaccaagaaggttctggagaaactgtctcaggagcgccccagggatctcagaagaacgtgctggccactcacgtgggacatcagcgtcacttgctcagagtcatcagtgagctgtgctggtgtctgacgggtccagcatagggccaaggcacctgctctgtgtcatggaccgagatggtccccagaatgatccaagtggtctctgtgctaatctaatgtagtttcacagtgaggggccgttctgagggggcttcttcttcagtgaaaggacctctgtccacaaatattcctaaatggacaggggcatgcatttcctcaagcaggattagggcttggaccatcagcatctcactcttgcaaggctgatgtgtcatttgtcttccctttcttatcatggatcaggctttgagctatgaaatgccctgtctcatgaatatgtaaatacctgagatccactgaggtaaatatggtctgtgccctgagagcgtcacccaacaatcacatcccgcctctagagaatcctccgagagcatggctcctcaccatggacaggacctagagctaatcttcctggtggcagcagctacaggtaaggtgctcccaagtcccagtgatgagaaggggattgagtacagtcaaggaggctttcatccactcctgtgtcccaccctccaatgggtgtctgcttccaggtgcagctggggcagtctgaggctgaggtgaagaagcctggggcctcagtgaaggtctcctgcaaggcttccggatacaccttcacctactgctccttgcactggttgcaacaggcccctggacaagggcttgaaaggatgagatggatcacactttacaatggtaacatcaactatgcaaagaagttccagagcagagtcaccattaccagggacatgtccctgaggacagcctacatagagctgagcagcctgagatctgaggactcggctgtgtattactgggcaagatacacggtgcgagaacccacatcctgagagagtcaggaaccccagggaggaggcagctgtgctggcatggaggagatgacaaagattattagattgaagactttcttagaaaatagcattaagtcatttacaaaaaggaacaatataaatgtgtatttgagaaattgtaattatttgagagatttcttatgcaacatttattctgtaagcaaattctagggattggagaattaatcaaattaataaagctgacatagaaattcctctgaaggtatctttgtaaacatcaatttctgaatcagtgttgtaaatgttttggaacagagacgcaagatcacattttaactctacttttgtctctataaaaaatgccaaaaagagtctcattttgaccatgtacctctttgaattcccaccatcaatgaatgattgttcttgggtttccacattatattaccatttatcattatgagaattgtgtgttttaaccattataataggtgagtaatggtatctaatttttgcttaaatgcacatgaccctaataaaattcatatttaacaattttcatataatttttggttagatgcctctcctgatatttggttcattttcaatagcactgttttcttttgattagttgtaagtttacttgcatattgattataaaagttaattaacaaattaaaagaattcatttaacaaatatgtgacttggaagttgcaggggtttgtcctgcacaccctgacacaatgacgaatgaataaagtgcactgacacaaagatattctgctttgccagctcgactgagcatctgggccacttagtcacagccaccgcctcgatcagtcagggagacttacatttattcagtaaagattaattgacaaaggccgtgagtaaacaccactagaaggtaattgacattgtggacctcttgagtggaaagcaattaagcacccgcggtagatcaaaggttagtcttaggaacacatgagtaaacaagctagttagataagctcctcacattcctttgtttctactctactttatgtaactaaaggtaaggggactaggctgccttcagccagatttattaccaaagttatgcaaactcacaggccttccaagagggtttgtggctattagaactaaaatgtttcccaccagcctgactggaccaccacatctccccattttttgttttctacatcaggtcttttggattggagcgtgcagatatgcgcagcaacatgtctgtcaggtgtggcagtcattgctcttattctggctttgcatcctagaattagcaaataacataaaacaatcatgagtagaattagcaacattcttttccagtcagagtgacccccaggagcggggtctaaccaggagagatgatctcacacacccttccatatgactgtttgttgggggtgtagatctattgcgtgaagagattctaaaattttagtttgaacttactttacgtctgctgttaaattgtcatgaaaggttccccagaggtattgttttacctcatcctaactatgtattgatagattccgtggtagagaagtgatacagatatgttcatgttcccagtcacagtttaaatgctgtcagaatgccactgcatcttgtcgctccctgacatattctaaagcagcctcaagggctagcagacgtgtgataattttttgatctataccttgctgtaagagaagttcattagacacatttttggccagattatctaaaaaggcagcagtttacactaagtcaataatacatgcaacagcaacactagctgttgccaggatgactatggctgagactataaaggccataagtgtaactatgaatcttttgtgtctgacctgggacagggcacgttctaaggttgcaagggcataggaaccttgccaattgcatgccagattgactggtaagaatgcctcagattttctctttaataccatggcgctagtaatttttaagttagatatactgtgattagtgatacatgaggcaaaccaagcctgtccctgcatccaggtcacaaacgtggagttttgaggtgtaatggaaatgttagttcccataaggaaatcgtatggatgggtagtgcaaattaggcactgatcagtgtgattatgaataaagcttatagcatagttgcaacgggaaatatggtatgtcccatgccaggtgttaagggaggtgctaagatgtcccagacaccataaagtaccttggggcggcatggactttacttggggccttggatgtgccatccccccattggcacaaattataggggaaaagacatggctatgaaactgattgatgctctgatggatgaaggtattagtaaggctgccctgcaatcagccgttgggtctccagtctaagatgttataattacctcactggaggctatgggctcgtctcccatgacagacctcccagctaaagtcgaaccgattactgtcccagctttgttccttagcacaggaaggaatgtttgggaaagaagcagcggcatggattgcattgctcagtttgaggctatctgcagctaagaatgttaaggcatttcctttgctatgatgtaaccatacttgtttttgggcaggtacacagtaagggttagagtctttataacttacacacactgggaggataatagtggattgacatatagtgttatctgccaccttagtccaatgtgtgccattattgagggaccccacgtggggtaaatctatccctcctagccaagcagtcacgttactataggctgggaagggagtgtcttcccatttggcagggtgaaagaaaggtgtgtctaagatagaggcccaatagagtgtagcaggtacaggttgcagacaaagtgagagcataaaaaggattaataccctacatgagttgcaatgtacaacagaaagcatagcaccaaacacattatctggagtaaatggtgtctgcatttggagcaggattcgttcagcctcctgagttgtctttttcagtatcccccaggtaatgtctggggattgtgttgttcacagaagctgcatcgtccggggctgtaggtcttgtagggttaactccttcatttctggtactgggttgggtcctagcaatgtcctggtatggtttgatgcgtcgtgctggaacccaaagaggacccgagggggtgtggatacaagcataccctcttccccacattaataattcacttggaccacaccattcattactgtttacatctttccataaaactgcaggtttcatgtattgggaaattttagcaaagtgcttttctacagcggattcaaatttgtcttctaaattaaaaaaaaataaggcttgtgccaaaagtgttgcagggtctgtacccatactcccacgtttttgttttttgtgcatattttaagggtggagttggcacgttccactattgcttgtccttgggggttatatgggatacctgtggaatgtcgtatattccacatgtgaaaaaattgttgaaattgtgagctggcattacctggacaattatcggttctaatttttgtgggttgttccataaatgcaaaagataaaagaagatgtttaatgacatatcgagtagactctccagccagagtatgtgcactaattaaatgagtgttgatatcaaaggatacatgtacctatctaagttttccaaattcagggatgtgtgtaacatctgtttgacacaacagattaggttctagggttaatacctgttgaaggaagagacgtacctgtgagctggcgatctgggcattgtaagataatttgtttagccagtctctgtgtaagttggaattgtttagataagtttttccaattttggtggaaaaattggtgcaattgggtggcttggtcaagcagtgatatcataacttgaaggtcggcttgattattgtcataacctaatggaccacgcagtgagctgtgggctggaatgtgtgtaataaaaataggatgtgtactttgatttagcaattgctgaaatcagagaaaaagagtccacagggctggctccagagttgacttaattagggctgtaaaagttctctagacccaatattaaggactcaactttagctttctgagtgctagtaaacccagattgagtgaatgaattgtgtggtgtccaccagactgctgcttttccatgtttaccagatctatcagtaaacagtgctaaagcattaaatatgggggagtaaactatttttgtaggtaacacgttaactaggccttttgggaatgatgaaaatgggtaaattctaagggctgttagtagaatattacccataaaatgaatactcttgtagccaggaaacttttttctactagggagcaaagcttgcttttaattgctccctaactaacttaggggctttttgtaatgtctctccctttagaggttactgttttacttaaactggatttggagtcatgttaggaataagagagagataacagtggtcattattagaaagaggtttctcaaatccttgaattttacttaactattagcatagaattataatctgggatgtagcttgtgtacaaggaacataacaaattttgctttgggccgcctgcggagccagagagcggagcaggcgggtcccagggcggctgccgctttgtgcttgcttagaagccacttttcgccaccgcgtttcctctgtgccagctccctccccacactgctcagcagctgctgccggcagaggggagcttcctgcacttgctcctgcccctaatgccttttcttaaccctttgtgtacctgattgccttgctgatcttgcattactgggcagtctaagagctccccttttaatgctgcttgtcgaagacagggacatatagctgtagtgtatttcctctattttttctatctattgaaagagggggctcaggcaaaacctccatttcctctttgttattttgggaagagcaggtggtaaggcaagtgacgtttcttcctccttcccctttttgggttcttctttgtataatgggactaaagccatctctactaaagcccatagtgttaaagatgatgctgggacccgttgcgcttgtgtgtaatgttgttcaagatttctccctacttgttcccagagctttacttctagctttccttcttctgggaccacagattatgtgagacaacagttttcattaggtgccttaattgagcctgcgaaactgatgctcccctagccttaagcaactgttacaatacttttatatgctgtttgtgttgagctgataactgctgtcccatgatgaaatctcagcctgaacaatctcccctgaacttggagatcccaagtgggcaccaatgacttactgttttactgacttgaccacgcagtcttcctcaaccttcgttttcatggggtctgtcacgctccctttgcagcgatcctcacatggggcaccggctgtgggggtctgtcctgcaggtcctgacacaacaacgggtgaataaagtacactgacacacagatattctgctttgccagcttgactgaccatccaggtagatcaaaggtgagtcttaggaccacatgagtgaacaagctagttagataaactccccacattcttttgtttctactcaaatttactaaactaaaggtaaggggactaggctgccttcagccagatttattactgaagttatgcaatctctcaagccttccacgaggatttgtggctattataactaaaatttttcccacgagcctgactgaaccccacaggaagtactttctccaagtctgtggttgccttttactcccttatcagtaggtatcgcagaaaaatgtgtgtgtttgtgtgtgtgtgtttgtacaaatttagattgaaaacatatataattttattcattcatagatcatgtctttggcattatatctgaagtttcattataaaataaactaatagtcattattttttccatatctctaatctcaggccacaatcaactcatgagtgtttaaacttcacctgcttgattggaggaccatcaatctaatgtatttggaatacttctgtaaggagatgtgttcttcttcctattattttttaattgatcatctattaatatcagtattggttgatggatgtccattttatactttgaaaaagatccatgctacatcattcatttaattgttcaaagcaccacagctttattaggtgctgggagctcattttgtttgaatcctgcatccttacagcacacctcacacctcatttttttgtttttgaaaacttgcgtatttcctggtattaccataaattctaagcttgttttctttattaccttttttttacatagaatcaaccacttttataaagattgcatgtttctgatgttaaagaatagtattaaaataaaacattgtgatactggctctgtgtgttgttaatgtggtatgagtacttctagaacctctcaaacaacggtcccagtaaacgtgcatgtttatatgaacccaagtttatggactcattgaaactatttatgtatctaatcttctgtaaccctattacattaaaaatgagaacacactggtctctccatccaactatgttagcacagagacctttctagtcttctttccttgagtttccataaccactcactacaaagtgagaaaccccattccaccatatgcaattttattacttagctgcacagtttcaggacacatgcatagcagtatctaaagtgtaaagctgtaccctttttggaaccatgtttatctattagaatagagtgcttatgtgcagattttttacacattaaacttatggaatttcctcgttttctgagttgcttaggtcagcaacttcattttccacattcttcaatgaagtcatttcaattacattgtataatttcatttatttgaaattccataaatgcttaaactatagtcaagtaaacagatagaggatgttccaggaatttagagagtgggtataaaataagcaaaaaaaagtgatgtttaagaaaaataaaactatttttagtgatatgcaatggctgagatatgacataactaatttgtctaagctaataattttgtgatggaaaatataaacttaaatatattcaatttaaaaaaattcagcagttcattaaccccaggattaaatgcagactgtataaaattatccaataacttatttggtgagagtggggatgttatgagatacatgcaacaaagaatgaagtaattttccttatttgcatatacaatgtttccattcactgaagaccttttattttaaaaaaatcaattttctaccttacccttgtttttaattcccgacaagcaaataacccaaaggattcttttctttcattggttgagaaagattttcccctaacttcagcttagttcaggcatacactgacctgaatgggcatttgccctcagatgggtacacacctgtcaatatgtggcctcttctgtcagacagacacagcttcactcatgtggattcttccctcaaacacaaatgtccccacatggactatttcctcagactaccacatatgtccttacatttacactttcctcagaaaacagacatttcctcatgtggactcttgtctcagataagcaaacatgtctcaatgtgaatgaagtcttcactcagataagtacacatatttcaacattgactgtttcctgacacaagcacatatatccaatgttaaactgtcttgcgacaaaatgatctcaagataatgataattataaactccaaccctgaaaacctgtggatctgcattttgtccattgtaacataacttcttctcattgtcagaaacagtcgtttgcagctataaatgcactgattacagtcagatttccattttctctggaaatgtatttcttatgttcttactggactaatttgttgacaatgtttgctcacatgaagatacctgaacagtgtccacattagagaataagaaagagcaatgggcagattaaccctgtgcatccagatgcaggaatcatttgactctgccttccctgaaatggagacacagaggatggatgagcaacgctgagtggtgcacctacgaccacaaagagaaagacgtggaaatatgtcccatcccctcctcatgaaaggcagctcatcccctgttccttcaggccctggtgaggagccaccccatatctgtgtctttcttcagtgttcacactatggagtctgcactgatctgggtttcccttctcatcaccctcaatattagtgtcccttgtaaatcaggtccagctgtggctgctcatagggttgttctcagtctatttcctctgtgttcatagaagtcctgtatgaagttcagtggtggagtcagaggggtaaacgttgtacagcccagtgattcactgagactttcatgcaaagtggctggattcacctttgctggcaacagcctgaggttggtctagcaggcttcacaacagggattgtggtggctggcaacagtgagtcagcaagtgggagtgctcagggttactcttcatgagtacaaataaattaactggtccagcgacaccctttcacgtgcactctaccttacaatgactaacctgaatgccaaggacaaggttgtgtaatactgtgaggttcacaggagagggattatctgcacgagcccagacacaaaaatctgcagagacaggagggaactgcatgatagatgctgctcagaagcaccagcgggcactcaacacaagggggccctcaggatacagctgggggcgctcaggacaccagggggtcactcaggatacagcgggggacgctcagaaccaccagggggctcttagggcaccagagggcattcaggaccaccagggagccctcagggccaccaggaggacctcaggacatgtcagcgtgctggagccaccagggggcgctgaggcaaccaagggacgctctgaaccgcgaggggaaggaagctcaggaccacgaggggacgctcaggacaccagggggcgctcagaacaccagtgggcactcagaacaggaagaatctcttagaaagcagctccacatcaggatcctgggaggctgtggagaaatgggaacactcataaactgttgagcatttaaattagtacaaccgctatagagaacagcttagagtttcctcaaaacctgacgatagttatcattataatctggcaatcctgctgctggtatatacccctaaaaaggaaatgtttttgcactaccatgtctgtaatagcgctgttaaagcactgttcacaacagtcaaaatttgaaagcaacctatgtgccgattaacacatgaatggataaataaaatatggtacatataggatatgggttaatattatgccataaaaaaatgagattttatcatttgcaacaacatggatgaaactggagttcattatattaattgaaatgagcccagaagagaaagacgaaattcacatgttcccatttgtttgtgaaagctaaaaattaagacaattgaactcgtggagatagagagggaaaagatggtccccagaagctgggaaggtctatgctagatggggattattggggatggtcaatgggtagaaaaggtgattagaaataataaataacacataatatttgataacacaacagaataagtatagtcctcaataacttaattatagattttaaaataaaagtttatgaatggaatgttggtaactctattaatgcttgagaggatgtataaactattcttcataatgtgattattatgcagttcatgctgattcagagttctgtaccccataaaaatatacatgtactatttacccacaaagattcaaaatttaagtgtttatgtgtctaatattctgtaactatattacattaaacctaagaacacactggcttttacacactactgtcatccacatagacattcatagccttctttctctgcttgtccataatcccacactccaaaatgagaaaacctctcctaccatatgacattaatttacttagtgcacaatttcaaaatacacaaatcgtctttaggattgttaaactgacccttgttgaaaatatgtttatcaactagaatacagtgcttatgtggagcttatttatattttacaatcgcaacatcaaattctttccaagtttcttgtgtccaatatttatgccccaccttcttcagggtaattagttcaaaccttctgattgttgttagatatttttatacagctgtctttttttgtgtttcatgacctgctaaatactttcgaagttgtatgcatttaggttaacactttgtctcaaaaaatatgagttttcagaaattctttatgccatgtgtccatcattgaatatcataaaaatagtttcattggccgggcatggtggctcacacctgtaatcccagcactttgggaggccaaggtgggcgggtcacgaggtcaggagatcgagaccatcctggctaacacaatgaaaccccatctctactaaaaatacaaaaattagccaggcgtggtggcaggcacctgtagtcccaaatactcaggaggctgaggcaggagaatggcacgaacccaggaggtggaggttgctgtgagcacagatcgcaccaccacactccagcctgggtggcagagtgagactctgtctcaaaaaaaaaagatagcttcattgtgattaaaaaatgtgtttcacctaatccacacaccttctccccaccttcctgggaaacctcaaatgtttactggatctatatttttatctttggcaaaacagcctggctgttttcttagcctcttctgcaaagcatcaagattcaccttcactgactacagcatgaattgagtccagatggctgggggacagaggctggagagggtggtaacagtgattgattcaagtggaagttctcagtgatattctgcatcagcacaataaagattcacaattcccagggacaccaattaccagcacagtctcccttaaaataatctacttggaagctgagggggctctcacaggggtaggcagtgtattactgtgagagatacagcgagggacatttctgtgagtccagacggaaacctccctgcagggagacaagagaggactttgtgataaatggtgcttaggacaccagggggcactcaggacagcagagggtgctcagcagagcagggtgcgctcaggacatggtgtgtgttgtagggggcattgctcaggatcaccagggggctctcagaaccaccaagggtcactcaggaaaccagggggcgctctggacaccagggggagctcagaaccaccaggtggtactcaggacaccagggggcgctcatgaccagcagggcatgctcagggcaacagggggcttgcagaaccccagttccaacgccagtgttggaagcacttttcattggcaagacactaggaaggagagcaaattggaggcttgttactgtgcaaatatgccaccgtgagtgtgtgtggggggggtaggtggggggtggaccttgaaacataaggtgtgtgcgtaaagtgataatctgatgtaaacttcgaccacagaatcctaaagaaaaaaaaaaaagaggctgccccaaagtccccatcagttcctggactcgccatgtgtctggaccatatcagtgcatctggagctccagggaaggggctccctggtggatttagtgattccttgcttcctgtgccaaggtctccctgtgggatatgttaggtttcctaaggtctattttctagtgtaagaagtgatgtgagaagtagttgctgtcactgaaggagcattcttagccagggcacagccaggtcatactgggcttgagatgctgggagaaaaatgctctgtgagcccagaaaagaacttccctgcagggcaggagctgagctgcagggggcgctcaggatgcacccagcacaggatccagctctggagcaggtgcacaggaggctgtggaggggttttctctcagggattgaatattccttatttcaaagccataatgacataaaatttaaataagaatttagcaagtactgatgtgtctttagtattctcttgcatacacagaggctaccaaacccaataacttaacgcaaaacacatttaaaaggagaaatgtctaggcctttcaaatgtatttatagttaggaattgaggggtggttttattaattcaatgggtgttactctccggagacacactcatcccagaagttagatgtgcagagggcaaggcccaggaaaagttcagattgtcagtgagccataggaacaagaaatcacagtgaggacaatgccctgtgagattctgggtttctgtaagaggagttctgtcttcatggacttctaagtgtgtcagaggacaaatatcattaaacaaagttcagggcagggagctcagtgtcccactgtggcatggtccgtgtgtcacctatcttcttccccagggtggggtggcctaagctatgaaatacctgcctcatgaatatgcaaatgcagtggtgtctaccgaggtaaatacagatctgtccttgcccagagagcatcacacaacagccacatccctcccctacagaagcccccagagagcagcacctcaccatggactgcacctggaggatcctcctcttggtggcagcagctacaggtaagagaatccttagttccagggctgatgaggggactgggtccagttaagtggtgtctcatccactcctttctcttctccacaggcacccacgccgaggtccagctggtacagtctggggctgaggtgaagaagcctggggctacagtgaaaatctcctgcaaggtttctggatacaccttcaccgactactacatgcactgggtgcaacaggcccctggaaaagggcttgagtggatgggacttgttgatcctgaagatggtgaaacaatatacgcagagaagttccagggcagagtcaccataaccgcggacacgtctacagacacagcctacatggagctgagcagcctgagatctgaggacacggccgtgtattactgtgcaacagacacagtgtgaaaacccacatgctgagagtgtcagaaaccctgaggaaggaggcagctgtgctggggctgaaaagatgacagcatttatgaggtttaaagtgtttagaagatgggttaagtcacagagtaaaagtagaaatagaaagatgtatacattccaattatataggaaataatcttttcaactttcaccctgtaagtaacattcacagagtgggaaaggcagcaatcaatggagtggatgcaaacattcctttgtgaggacataaattttaaaatcgaatggataaatcatttggagcaggattgcttgatcacatggtaagactaaatataatttctaaaaagtgaccaacatttctaacaaaatgtctttgccactccttttacattaattttattttaaaacatttttaggattgcagcaaatttgagtagaataaacagcattcccatgtactcctgcccaagacatgcacagacttctccatgatcaacaccctgcgctgaagtaataaataacttgcaacagatgaacccacatggacaccttgattgtttcctttcctggtggcccctggtataacaagcctaaattaccttgaagcaccccaggttcttctagtgggttacaggaaatgatgccaggtagagggaaagtgagtggggatgatcctctttgcactgtttcctcaagaatccataaaatgtacattgatttagagctcaactaactcctggttttctatgcccctttccagaaggtaaggtctccaagaatttacagcaggggatctcctcaagagtccataaaatgtacagcggtttagagctcgtctgactcctggttttatatgcccctaccaagaggataaggtctccaagcacttacggcaggggtctccaacccctaggcagtgaacccgtactggtcagcagcctgatagaaagcaggctgcacagcaggagatgaacagggggtgagcatcactgcctgagctccgcctcctgtcagatcagctgcgcattagattttcctaggagccaaattctattgtgaactgtgcatgcaagggatctagggcgaccgctccctatgagaatctaatgcctgatgattgcaggtggaacaggttcatcccataaccacctgcctccctcatccatggaaaaattgtcatccatgaaactgttccctggtggcaaaaaggttggggaccactggtgtagaggcaggtctgtgcaactaaaaggccagtggcttctgctgaatcctataattaatgtcctttaatgagaagtggagactttggtcatgagggctttcgtgaataatgcccttcagtcggattcaaaacactgtaagatcttgtgggtgtttctggataaagcactttgggcagaaaatgcaaacacatgcatgagatccaggcaggaaaaacaaagcttcctttacaaagtggtttggcacgtggaaggagctctcagggttgggcactgtaccctttgctgactacactttagccagaggcctgagcctgattgggtcacaggttacaaaaacgtctgtcatccttcagctgagcaagcatatctgcgtgcttgtcagtgtccaccccatgaggggtgcactctggaagatgacaagatgtacacaaaccttctcccactgattatccactagcacacactcaactgcaacccatgctccagaaagggacaggggcctgcagggataaacagaatggaagtattttattacctgggaaagacactgccaaatatcacgtttcaggaaggttaactcataagtgttcaggaagtgactgaagggcagtggtgggtgagctgacgggactgcctcagggctgcacatgaggagggctccctcccacacagccttttcctccaggagctacaccagaaactcatagaagatcaggaaggattctgagaacattcttctgtggtgctgcctagagggggaaaataaattataaaaaataaatcaattctaaacaaagtatgacatttgttattagaaccatttctgaaacctgtgggaatcctgacataagccaccattctctgtgaataaacatataaacactccttccatggggaagtcaacgaagttggatcggttctttcatggataacatcccccaaagtcctctccattccctgagcatccccgggtctctcagtgacaagttctcctcagtggaatgtggttgatgtagtgagatcttcaattttcccgtgttctgtgttctcatgttctccccttatctgagattaagaaactcgcctgcatgtggtacatcacagtctaatgtctctcatggacaaaatagtggccacagcaaccaccggcggccaccatcccctccacagcctgtgttggaacatcacctgagagattgtattagcaactttccttcagaatcatcttaaaaactatgtgtcccatttcacatggagatgtcatctatccattttctcttcatagacaaatagaaggagatgaatacccaatacacttcatatctccggattattcaaatacgattgtcactttatcaccttctgatttctggccttcgcagaacactctataaatttttctcactggtattataccaaaacttacaaagtgctggatacagggattattttaaccaacattattctaatgattctaagaatgtagaattacaattatcctcttttcatatatggataaactaacctatgcctttgaaaataaacccttacataagagtgaaaaggtaagctatagatttggagaatttccttgcaaatccgttatttggaaaagggattttatcacaaatatacaaattaacttacaattgaacaacaataaaaccacaacatttaattttaaaatgggcaaagacctgaatagaaaccacatctaaaaatatatataaaaagagatcaacttgattttcatgaagtacatgtttgtttaatatttttaaaaattctgctaatctatgagaatgggtaaaatacacaatgtagacaatatcaaacggtgatgaggaagttgaaaaacaggaactttcactccttgctgctgggaatgctaaagcgacacatagacaactccagttaataatttactgtatgtttcaaaatagctagaagataagatttagagtgcacataacacaaaaagtaatcaatgattgagataaaggctatcccagttatccagatttgatcattgaacataaaatgctattatcaaaatatcaattgtaccccctaaagattttgaactattatgtatctatataaattaaacattaaaaaaacaccaatgccaaggaatccagctaattgcagattcccatttattgtgggatctggccagcagcctgcaatgcaatggggctctctctttgttcccaggaggatcagcaggttgagaaataatagacacacacaagatagtgtacactgagtccaggggagtcaccgccttctggtcccatggtgccaacaatgcactggatataccagcatttattattaagtttagtaagggtgggggtaggttagtgagggatttaggatcatttgattatgaggtgagatggtcacatcaggatgaagtaattctttaacataacatctgtatgcagaagtacagtacatttgtatgtagaggttacagagataagaatttacaatatagtgtgtgcatccataatttctaacagagccttaaaacagaaacacagtctttccataacctgtgattagcaagatattaatcagcagtaacagttgcagcaaaagctggttacaaacaatccatgaaacaggacgtgaagctagacaacgggttagaccggaatttctcaaaagggagtatgccttaaccctaaagaggcttagaagagccgtggcaagatgggggcgtttatagccctatcttatccatatggacaggtgccccccatgcgtccgtttataggctctccacaagggtcgcattccattcccagagctatgaacatctgcttttctgggacaggaatcttggtgatgtgaaacctccctgactgcacgtccattcacaggctctctgcagggggaagcacatcacgcgctgttggcttgttctggcagtccaacctggcattgtctttacacaatcctgcgtgcaattttatatttacaataatcaggaggatttcatcttttattccatagcaatagtttcagggggtctccctacacccgttagatgggatgtgctgcataatctgtaaactaatcagagtctgtgggtttgtaaaggactttagaaatcaactggactacttgtttctaaagataagtctcccaagtttaactgttttcttaatggatggctattttgaacatagaagaaatgttaacatttgtttctggtaagttttcttcttctagtctcaggagaaaaagtttgcagggaagaatctgggaccatctttcaagtctcaacttcaatgtgattatctcgtaaatattttctggtacccctaagataaatctcatatctgtcctagaaactaaaattatgattctaagcatccaactgactggatggacccttcctcttcaccaaggagttccagagacttgaaaacctagctcacgccatgttagaaatagaggatcagaaatgcctcattataccctcccccctttggaattcaagcacaactaaccagcatttttataaaaacagatcttaagcctcagaaaacagattctttgtagcagcaaaatgccaaattctaacttgactcaagaatagcatcacatgacagagagcagactttgaaaggaatcaaaggctagaatattccttcgacatattttaaaatcgccctgcaaagttatcttttgtgagagaaatttatattctgtagagaatctccttccctttccaggtgtttttgttatactgagattagctgagagtctagtatcttttaaaggtcttaatagaaaacatttcccatccactgcctctaaaagtggtcacaggacacaggaaggggaacatcacacaccggggcctgttgtgggggttgggggaggggggagggatagcattgggagatatacttaatgtaaatgatgagttaatgggtgcagcacaccaacatggcacatgtacacatatgtaacaaacctgcacgttgtgcacatgtaccctagaacttaaagtataataaaaaaatatatatatatgaaaaaagagacttcatatacataataagaatcttgttctccaaaacccgttatcttaacctagaaacgtttttctactgctttcaggtctttagaaaaaaacttaagtctttcaaccaattgccaatcagaaaatctttgagttcacctgtaaggtgtaatcccctgcccatactgactcacttctagcagtttttctttatggaccaaatcaacacgtttctctcatgtattggttgaagtctgtctctctaagacattaaatttaagctgccatcaagccactttgggaacatgttctcaagatcttctggggttgtgtcacagggcatggtccccacatttggctcagaataaatctctccaaatattttgcaaagttggctttttcatcgatagttctaacagaacctactctgtggtctttgttacaagcatgatattaatatagtattagttatattagtattagttatagcacatgttggcaatttcttatgaagttatgcatagactaacaatgggatcaagtgtaaatgtttcaaagcatttatgcagttatttcaaaatctacattccacagattcttctatcaggttcattatatcagctaattatttgttttatgatttttttgcaatttttgcagacagattctttcttttcttggcctttattgtagaaaattgtgtgaaactagtcagggctgcatttgaaagtcattgtcacagtggctcccagaatctaagtgcatttcctcttcagccaccagacactcagattactctaatgacaccttaattttgttttctgcttggcattgggccttaaattgtgtgttccagagagactctgtctttcatctcacccaggtcatcccagagccacatggacctgataattgtcaatgtggtgggaagggtcgcacagaacgggcactctctgtccttctgagggagccacactccaggcagacatcacagtcctggctgaggacgtgtccttccaagtatccctgcccctcctgcaggtgtgatgctgatccatgcatcttcctcccattcctgggtagagggtctcgttgttttttcccagatcttcttccagcagccactatgtcttccactgatgtcttcagcttcctcttttctgcccttcccagcaggatgaggctatttttcctgagggaagagagaggaggtgggagatgaggctgttattcctgagagaatggacagagctttggagcttttctttcttccttcccagattctatgagttcctccagtgcctgtaacacagaggtgttagtggctttgcccctgcatgttaattctttggtcatgtagtggtggtgagggaggtgggtctggatgcatttcagccacagctgctgttccgtttcccacacagaaccatctcgggagggagaggttggagatttttctgatgtgtcctcaatcctggcagaaaaggtttcaatagcaataggattccctcagtcgtatgtcctctgagaataaacaataacttctttattatactcaattttaaacaatccaatgaatatgtctaatttaattttgcattagattatatgacatttgcaggcctctgccccagataaggtcatattctcttctgtttgttcctgcaagtcactgattttctcaagatgtaaggtctcttgattgtcctataacatcaataatctgatttattaaagaaaatgtgttaatttgcatgtcagtaaagttaattgttgttgtaaaaataatatattttatgggatgcctacatctcccagctgagtagaagctttatttgtaatactcagaaactggaaattatgcaaatattaaggagatttctaaataaatactatggttgctgtcttaaactggaatgctcttcctcatcagaatcaacacattctttatacacaaccaaattactgactcacaagtaattatgctgtgcaagaagccacacaaatgaaattgaaaatgtaagatttcactttaacaaaatctcgaaaaatagatctgaattaacaaagatgagaggttgactcagtatggtgagagggaaatgactgggaggcaggaatgagaggaacacaaggaagcttttaagtgtaattcatcgttgtttttattgtattttggatgcacaggtgagcacatgagaaattacattttttttttccctttggagacatggtcttgctttgtcatccaggctggagctcagtggtgagatcacagctctctgcagcctcagaccctgggtctccagcaatcctcctccctctgccctatgtatgcaccaccatgctcagcttcagtgcttactacactgcacactttaattatgcaatatttattatacagcaataatgcctcaataagggtatcagaaataagtgaatagataatttgttagataaagattgatggaaagacagacactgacatgagaaatgtatgacactcaagaaaataaaactgtaggaaacgtgcttttcttcacatttgttaggtaatcacaacagtgcgtacacatcacaccatattcttgttacagagaaaaggttctgcaaacctcagtaggtgcgacgccctgtgtgctgtgcttagttcagggagcagtcaggctcggtggtgagaagcacaggcccagatacccaggtcaccctgaccaaatgtgaactctagggagattgaacaaccgatctgtgattttgctggtaatttttcatctgttacatggaaataacattgatactacataccatggtttcactgcatatgaaaaaataaaagatgatttgttctaactttaaacatatgcactttctgttgatctactgtacctcaatagaactgttttaaaataaaaattacaaaattataagatttataggttttaaggttttatcacagagcagatttaccataagaaaccacaatttcccaaatgctatcaatatcacaaatctccccaggacactgtcacgtgctctgagccccactctctccaaaggcctctaaccagagagcttactatatagtaggagacatggaaatagagccctccctctgcttatgaaaaccagcccagccctgaccctgcagctctgggacaggagccccagccctgggattttcaggtgttttcatttggtgatcaggactgaacacagaggaccaccaaggagtcatggctgagctggctttttcttgtggctattttaaaaggtaattcatggagaaatagaaaaattgagtgtgagtggataagagtgagataaacagtggatttgtgtggaagtttctgaccaggttgtctctttgtttgcaggtgtccagtgtgaggtgcagctggtggagtctgggggaggcttggtaaagcctggggggtccctgagactctcctgtgcagcctctggattcaccttcagtgactactacatgaactgggtccgccaggctccagggaaggggctggagtgggtctcatccattagtagtagtagtaccatatactacgcagactctgtgaagggccgattcaccatctccagagacaacgccaagaactcactgtatctgcaaatgaacagcctgagagccgaggacacggctgtgtattactgtgcgagagacacagtgaggggaagtcagtgtgagcccagacacaaacctccctgcaggggtccccaggaccaccagggggcgcccgggacactgtgcacggggctgtctccagggcaggtgcaggtgctgctgaggcctggcttccctgtcatggcctgggcggcctcgttgtcaaatttctccagggaacttctccagatttacaattctgtactgacatttcatgtctctaaatgcaaaacttttttgttctttttgtatttttgtttttgtaacaggaggacacaccctcacctccacagaagccacagtgtcactttgggggcagatgatccttctgtggtcagcaggatgaaagttccgaggaatctcaggggaacccgaagagtgtttgccagttagactcagggcagcgacctccacaggaatctctgattagaacaggctttgagttctgataggagccaagagagacgctcacccagggtcagagtccttaaaaccttgtggttttcacagcaatcccccctggtcttgtaaaactgtgtacatatgactcagactgattcacttgaccccctttctgctaatccattttccttctctgcatacttgattctcacagttccctttcttcttctctttcctgaaaacagaggatgtgttttctgtagtcaaaatcccagagatcaggtctgcaggacctgggtaggctgaggggactttctcactcaccataggctgatgacactcctgctgtattttgtgtgtggaggtgtttggaaaacgaaatgaacattagtcatgaagggaataatactagttttctccaaagggatgtggatgtagagctgatcttgtgcttctcacactgtcacagaatttatgctctcccctgtgactttaggagagctgaggatggacactccattgtgctgtgagctctggtaatagtaattatagggtctggctaggcagcctaaggtcaatactgctggccttcgggaaaggcaggctgggattcctaggaaaacctgcatctgccgtccagcatggagtcccatcgtcttctgttatgctctgattgaatcaggcccacctaggttatctagaacactcttcgtgacttgggcaaaattagtggcaggctctactaagacctgcattatgccatgggagcaacacctaggctagtgtgtgattgagtaggtgagactgtggtctagtcaaggtggcagggaaaattgttgccattattatgttttattttatatttggcaatacagtcatgctcatattacaaatacctttctacatttttcgtgtcagaagcttttgaacaagagcaacttcatcttgaataagggctagaaaaaataagactgagacctgctgggctacatttccagtaagctaaggcatccttagtcacaggatgagataggaggtctgcacacgatccaggttataaagaccttgctggtaaaggttacagtaaagaagctgggcaaagcccaccaaaaccaagatggcaacaaaagtgatttctgttcatcctcactgctcattataatgccttaacatgctgaaagccactcccttcagcgccatgatggtttacacatgccatggcaacatcaggcaggttccctagatggtgtacaaaggagggaggaaacctcagcttcgggaattgcccaggggactcatgaataatccatccgttgtgagaaatacattcatccctttgagagaaaatgcacagggggtggaatgaggctgggaagctgatggcacatggtggaagcctgtccctgagtgaaagagagagggaagctggattgggtggaaggtccctatatttctgtgctgtgcaaggaaggtgcaaaatataattgagtcttgtgcaagtcagtgctgcctctcaggggatccccatgactcccagaaataatggctctgcttaggaatccctgcagagtcactcctttcattagagtagaccacaggacatgggcctcagcacctgccatgccacagatgtcagaaagcagctgctgggaacctgacccacctgcattttgctgcctgtaggaggagggagggacgtgcattctcagggccaacacgctgtttttggatttttatagagaacacctgcttttactttactttttggaaaaatatatgaacaaatgtgcacctgcaaacaattgtaattttcacatttattttaattacatttgtttataattgtgcatgaggtcctggtgcagagttgagtttttcatgggaattgttccaagaatcaagaacatccattttccactttcactggtttttccccatgtgcagagaccttgagtagagcacatctggcccttatccacactatctcttgtgtccccgggaaagagcagggatttgcctgactgcagaatctggggtaggagtctgcacacctctgagcctgcagagaagcccagagaagttttatggagtcagagagctttcccgtgtggggaacctctagcttcctcactctcagagattgctggtcagctgtaattgaggggttaagaattagagcacctggaagcctgtctcatcacagctccattatgtaacttaccaccattagactgcaggtaataactcaatcttgatttttctgaccccatcttattcatttgtaagtttggttatagaaaatgttacattttagtttctgattcaaacctcagaattttgtgaattcatcaggaataattaaaaatgtgtccagtttttgggaaatgtaaattaatgtccatactgtttatgtgtgtgtgcgtgtgtgtgtggggggggacatgtcagtcacttacaccccagtaaaaatgattccttaattatatagtcgaactgcaattagatttgctgaaaattgtctacagtaatttctgtgaagctgaccttgccaccttgctgtgaggtgtgaggatgctcagtgcacaggtgaggtctcacaggagagatccaaggttcagcccccaggactggctgagctcctggcttggagccagacataggactgggcatctcagaagcagatcccctggccctcctttatctgggctgtatgggcagcagaggacaagcagaagaaactcagaactcagccaagacagagccccatttaggagcaggtgcatcaaggaaccagccagagaacctctgactacaatctagggttgtcttcttttgcttcacagcatccaaccctaaggagaccacccactatatcatctgtaactcagaactttcttgttacaaaggaaaacacaaatgaatataactctgcagttaacttcttgaacctggattgatgagtttccatggcctcatgagcacagagaccacatccagtgcaggtgcagagcaaggctgcaacagtcagcctgctgctccctcaggagtcttccaattcccttgtccaaagcatccgctcattcatgggctgagaaaagggaagtcattcatgcagtctactctctccacagaactgacggggcacaaggacaacatcgatttttcatggaacatgcctctaggaatgcagctgtgtgcacacacactgctaagcacacacttctttacataattacttgtaactgtattttcttatttattctctccaatttttttacacaaattcatcacttttccccataatcaaagaggattttgatcagaatgcttgtggggagccccttgcctgccagatgcccaacatcactactcttgaagggaggaggaacggcagctctcttgatttctactctaatcctctaggactaaaaccagaaggttgcatgtccagtgcgggagcatcgaagaagatcctgtctgtagaagcaggagcgtcaagacttgactgagagccatggtgctgaaatgagatagattccctgatggagagcacacgtggacccccacacctgagggctcactgctcctcaccacagatgcactcccctactgagtcctgagacctgagtgcaccccatagagtagggctcagatgaggggatgcaaatctccaccagctccaccctcccctgggttcaaaagacgaggacagggcctcgctcagtgaatcctgctctccaccatggacatactttgttccacgctcctgctactgactgtcccgtcctgtgagtgctgtggtcaggtagtacttcagaagcaaaaaatctattctctcctttgtgggcttcatcttcttatgtcttctccacaggggtcttatcccaggtcaccttgaaggagtctggtcctgcgctggtgaaacccacacagaccctcacactgacctgcaccttctctgggttctcactcagcactagtggaatgcgtgtgagctggatccgtcagcccccagggaaggccctggagtggcttgcacgcattgattgggatgatgataaattctacagcacatctctgaagaccaggctcaccatctccaaggacacctccaaaaaccaggtggtccttacaatgaccaacatggaccctgtggacacagccacgtattactgtgcacggataccacagagacacagcccagggcgcctcctgtacaagaacccaggctgcttctcagtggtgctccctccccacctctgcagaacaggatagtgtggctgagatgccatttcctgccagggcctgcgtttcccatccccatctgactcagagccttgttttcctccctcttctttactaataaatggcatgtcccctgttagtggttcgtgcaagcagaagctgtatcctgtttgacaaagattcagcatgaaaggttcctgttacctaaaaaaaaatagacagatgagacttaattaacctaaataatttttttcacaacaacagagtgaatacacaatttgcagaatgacagaaaacttttgcacactttgtctgtgacagggaactaatatgaagaatttgcaaggaactcaaacaactctacaacaacaacagcaacgagaaccaaataaccccattaaaatgagcaaagaacatgagtagacattttcaaaagaacacatagaaatggataataaatatataaacaatgctcaacatcactaaccatcagggaaatgcaaattaaaaccacaataagatatcatcttccaccagtcacaatgactgttactaaaaactcaaataatatcagatgttgctgaggatgggaaataaaggcaactcttagacattgttgatgaggatgtagacgagtacaacctctgtggaaaatggtatggagatttcccagaaaactagaaatagaactgccatttggtccagcaatcccactactgggtaactacccaaaggaaaataaactattatttcaaaaagatacccaccttctatgcttaccataaaactactctcaatagcacatatgtcaaactgagtgtctgccaacaaatgattttataaaagaatatagcacgtatgcacaattcaatactagtcagtcacaataaggaatgaaactgtgtcttttgcagcaagatgcatagaagtgggggacaatacaattagtgaactaactcacaaacagaatgtcacatgtcacatgttattacttgtaagtgggaggtaaacagtgtgtacacaaggatttgtagagagaaattatacacattggagacttagaaggatgggtgggcagaaggtgggagcatgatgagtcattacataacaggcacaatataaaataattaagaattgaccaatgatcttaaaattaaaatgtagaatatgatcaataaatgaacttgatattagttgacctcattaaatttaaaaactttttctactcaagtgactgtaagaaaatgaatgcccggttacagatgagaaactgtttgcgagtcatataaccaccaatgtaattataataagaaccttcagaactcaactgtgaataaaaaagaaacaactgatggataaattaggcaagggtttctacagacatttcgtcagagaagatgtgcagatgacactgaagcatataaacaggctctcaacaggattttccattagagaaattcaaatcaagcccacaaagagacaccactgtacacttttcaaaatggctgaaattaagaagaaatacagataacatcaatgctggtgagcataccaggttgctagaggctaaaacattgctaacgggaatgcaaaatgaaacagatactcaggaaaataatttttagttttctctaaaatcaaacatacccttaacacctgaatatttgcatcagagaaaaacaatcttacattcacgcataacttctattcaaatattcaagatatcgtgtgtatgtgtgttagaaagtaaaaataacataaatgtctcaaaatttgaataggtgaagaactaggaagcatctataaattgaataccaccagcaataaaaaaaaaaacaagtgaccaatacataaaccattgcaggtgaactccagacattgtgctaagtgagagaagccagtctcaaagatcaaagggacacagctgtaagcaccacggtcatcctcaggtgtcagtggtttgggctggactttctgtgtctctttcctgaccagacccagatgttgagctccaccacttgcagatggaaaatcctattttcaaccatgcagtgaggtttcaactacttcacagactgaacgacacaaacacgggctcctttgaacagcgtccggcatttgttccaaccacaagagaacgtccctcagctctcccccctcctcggttctctcctgcaagccagcagccctgcagtttagtctgcatctcccatgcatccacccatctccctccaagcaccttcccccacaccctccactgtttctgagatcacaggcaggctttgaacttttccgcattctgttgttattgaagttaggatgtttaggaccaacttaaggatcatattttatgactgaattccagtgccccttctctcctgggacagagtgcataaccaagtttctgcaggtggagacgaagttgagcttttttcttcctcagcctaggagatgagcgctaattggagggttgggcagaagcttcccaccatcccagcactttggttctggtggggcggaatcggtgccatagggcagagctagaaaccgcggactgaatgttcccagtggcactggacccagggcagagcctccatccacgagtggggctctatggaagaagtgagtctctggctctcagtagctctcgtccagcactgaacctcagcatcatgtgctgtgtgcagggtcagagggccaacgtactggcccctgggaaagcgtttcctctggtgggagttggtagaaggtgtcctgtcttcttggctgcatctgtccgcagtggagtttacatcatgctgagctgggatgtggaaggaaggaagagcatcttagatcaaatatgatgactggccttactgagttttctagattttcctgaataaatgtttcttcactcactgtgtgctgttagagtctttccaaacctgtaatttcccaaaataattttcactggtctcatgagggcatggattcattgagcccctcatgctgtcaaagagaaatagaactgttttttttttcacttcatagcgaacatccatgggttatcaaataatgggctggcttttcttccaacactttacagacaccatcaattttcttcttgcttataaggttttaaccagaagaatgctgtcatggtcttttctgttcttttggaaggaatgccccctctactcacctccacttgtctgcctgtatttctatttgtctttggttttcaacaattttaataagatttacctaaatgtgtgtggggggagcatggggtgttattctgctgttctgtgttctctgagatgcatggattcaccatttactctgtctccatttttgtgaaaacaattagaaaaaatgtcagtgtgagcctagaaacaagcctccctgaagtgggcacaggaccacttgggggcgcacaggacccactgagcacaagagccaacctcagggcaggtgcagatggggtttaaggtctggtttcctgtcagccctgtggcttcctctccatgaaacagtttcctttgtggcatatctctggattccttatcctgttcttcctgtgaagtctctgaagaagaaacatttgtcgtaacaagagaaaaactttctcacatgcaccaaaggcagagtcacctacagtcacttactcctgtttctcaatgtcaataagttatcaatgcttctgaagttaatcagctaaatctataaaggtgcagtgtttaactcagcattgcagcccagctcaacagaactccaaaggccagccagcagcagccaggataatgagcatgctgggcattggggcagaaggagttagcatccagtgcaagagaagaaagcccccgtggtggtcattgtcaggactccaatcccacagttccaattgtaggtgatgccaggcaaaggaagagagaccccaccaatggttagtgtggatgtcgagtttgatgtttccacactcacactccaggtgaatatgaaaagatttattagctctatttctgaggtgtctgctgagagcagcacagtcctctcaagaaattacagattggaatttcctcagtagagcaggaaaggaggctggctcagggctttataatgatttggtggtggggtcggcggggggggggggggcgtttctactcaggagaaggagcttgtgtgatttaaacctcacactgacatcacatgagggagcttccatgatttcttactagatttcccatgtgtgggggacaaggatgagggagaataaaccttaattcatcagcatcaaggcaccaaaaataggacctgacactttattctccctagcagcttaagaaaatgagtgaaaaagagagataagagtccacccatgtgctgaaaagcatagctcttggtaaagacgagaaaaaggcactcctacgaagaaggggttgggcagaagctttatgctgaagggtttggctaaagagacataatcaacaggttacaggaggggctactgatgttcatggaggtggtcctcacacatgcatactgaacaaacatgtctgtaacgtatgacccctgttcacttaccagtggagacttagcatttaaattcattccagtcaggccctatgtgcaaacagcagaagcagagacacaaaggtactcagggtgcagcctctgtgaacggccagagccaggccatggtcagcggtctcggattaggagaaagttcctgatatcactgtagtgttcaatcaaagctggggttatggtttgtggaacaggggtcagttcatcagggggtgggctgcaattgtcttcatagtgcttgtctcagtgccggtgcttactgagccactagagaaaaaggtttaattgagcttctttaaaatcaacattttgaattatttatcagacgtttcaaatatgtcatgttgtttagattctattgctggagagttaaggtgatatttggggttttgtaactctgttttttcatacttcctgaattgcttatctgtttgcttttcattagctaaactatcgcttcttcttattttttaattcattctgattttgatgaatatttaattccctttagaatgtgaatataatgtacattgtgtgggtattttgattttggttcttggtttacttagtggcaaagactctgtaagagttccttgtctatagatagccattatttagtggctttctgaaatggtggttttagtaccaaagtactggacttgtgagtaggctcactgccccctgcaggtcctagatagtggaggcctcaggaactgtttctcatttggaatgcctttgtttcagcagattttgtgttgggttgttaagttcaccctccacattagtagatgtccttacagattagagctgactctggtagaagcagttgagtgcatgcttgatatctgtgcacagggagaagctctctgttgcctcaggcgatggactggtctatgaaatgcacagtgacctgagttccctgctcagcccctgagaggtggaccaagctggacacacatgagccaccgagcctggcaagcaaaagcgccagccttgatggaaatggcgagctgagcggcatctactcagtgtggtttcttttgttattaagagctttagtgtggtggctgtttcaaattcccgttgtagtagtaatatactgggtatgtgagcaggcccgtggtcttttgcggggttggaatcaccgaagtaatgagaagctaatctcattttcaactgctgtacactggtggtattgagtttgtatgaggtcatgcagtttgaacgtcaggccagtaggtggtgctcgcaggtaagagccggctatggtggcagcagaagggtttatgctttactggtgattaaagtgggaaacttggcgtgttccagatcttagagaaaagatttttagttatttctcattcaacctgatactacctgaaagtctctcgaatgtaacttttattttgtcgagatgggttctttctatacccattttttatgttttttttgtgaaaggatgttgtttcatcaaatgcgttttcagcatcaattgaaaaaagttatatgtggattaaagatcaaaatgtaaaacctaacactataaaacctctggataataacataggaaacagaatttaggaggtaagaactgacaaaggttttataatgaaaatgctagaagtagttgcaacaaaattgaaaattgacaaatgggacctaagtaaattaaagaacttctgtacagcaaaagacactatcgacagagtaaacaggcaacctacagaatgggaaataaaatatttgcagcctatacatctgacaaaggtccgacacttagtatatacatggaaatttaacaaacatacaagaaataaaaagtgaccaaaggacatgaaaagacacttcaaaaaagacctacatgtggccaacaagcataggaaaaaatgctgaatatcactatcattagagaaatacatatcaaaacctcaatgaggtaccgtctcacatcagtcaggatggctaatcttaaaaaaaaaataacagatttttaaggttacagaaaaaaggggaaatttatacacttttggcgggaatataaatgagttcaaccattgtggaaagcagtgtggtgatccctccaataacctaaaacagaagtttcatttgacccaacaatcctacaactggacatatacctaaaggaatataaacatgtaggttcactgcagcactatccacaatagcatagacatggaatttacctaaatccccatcactggcagaatgatagagaaaaatgtggtacatacaaccatggaatactatgcagctaaggaaagaatgaaactatgtcctttgtaggaacatgatggaactggcagtcaatactcttagaaaactaattcaggaacagaaaaccagatattatatattctcccttatttgttggagataaataaaagcaaatattcttccagggcctgagtcttccttattcaacaagtcattctaaattaagtgttcagcaagttgctgatactcatctaaatattctatttcatctgggccacttacatcactcaaaaagcaatgagagctatatttctaaggggggttctaggataataaatacctgaatagtgagaatatgaaggatatggaaactgggccacttatatcactcaaaaaggaatgagagctatatttataaggggggttctaggataataaatacctgaatagtgagaatatgaaggatatggaaactgggccacttatatcactcaaaaagcaatgaaagctatatttacaaggggggttctaggataataaatatctgaatagtgagaatatgaaggatatggatggtttttttttaactcaatgggcacataactgtgggagatactatattcctatgaagaaggtattcagacttcagagataagtaatgtttcctacattgtgcttgtgacttggaagcagtggattgaagagtgtgataagtgcccagaccaagcagaacagaaatcagcatgtaaagatgatgatctatggatatgatctaaaaccatgtaaatacttcaaataattctatttaatgcagtttgaaataaaacacaaacttattcaaaatacaaattacttggtaattattttgggagctatgagttcaccaagaaactcaaattcctatttctatttcaacccctgattcctactgtcaatgggagggaagtctcagaaccaatcacacatcagacggcaaatctgtcaaccaagagtctttccactgaaggacctgggaggtcaggaccctcaggaaagtgctggggaccctgtcttgggagtgcccagcagatctcagaactctccatgggtcctgctggacactcatgtagggtaacgagtggccaccttttcagtgttaccagtgagctctgagtgttcctaatgggaccaggatgggtctaggtgcctgctcaatgtcagagacagcaatggtcccacaaaaaacccaggtaatctttaggccaataaaatgtgggttcacagtgaggagtgcatcctggggttggggtttgttctgcagcgggaagagcgctgtgcacagaaagcttagaaatggggcaagagatgcttttcctcaggcaggatttagggcttggtctctcagcatcccacacttgtacagctgatgtggcatctgtgttttctttctcatcctagatcaggctttgagctgtgaaataccctgcctcatgcatatgcaaataacctgaggtcttctgagataaatatagatatattggtgccctgagagcatcacataacaaccacattcctcctctgaagaagcccctgggagcacagctcatcaccatggactggacctggaggttcctctttgtggtggcagcagctacaggtaaggggcttcctagtcctaaggctgaggaagggatcctggtttagttaaagaggattttattcacccctgtgtcctctccacaggtgtccagtcccaggtgcagctggtgcagtctggggctgaggtgaagaagcctgggtcctcggtgaaggtctcctgcaaggcttctggaggcaccttcagcagctatgctatcagctgggtgcgacaggcccctggacaagggcttgagtggatgggagggatcatccctatctttggtacagcaaactacgcacagaagttccagggcagagtcacgattaccgcggacaaatccacgagcacagcctacatggagctgagcagcctgagatctgaggacacggccgtgtattactgtgcgagagacacagtgtgaaaacccacatcctgagagtgtcagaaaccctgagggagaaggcagctgtgccgggctgaggagatgacaggggttattaggtttaaggctgtttacaaaatgggttatatatttgagaaaaaaagaacagtagaaacaagtacatactctaattttaagataaatattccattcaagagtcgtaatataagccaaattcacagagtggaaaaggccacactctataacgttgatacaaacattccatgaaggtgctactgtgaacaagttttcaaattggatgaatacatgatttggagcaaggttatttgatcatgtggtgagactaagaatgattcttaaaaagtgccaaaagtttccttcaaatgtttctgtcactccttatcataaagtttattttacagcagttttaggattacaaagaaattgcacaggaggcgtgagaattcccatgactccctgccctacacaggcacagcctcctccactacgaccatcctgcaccgcagtcacaaatcagttacaatggaggaatctccaaggacgcttggttctttctttttctggtgatctcctaatataacaagcctaagtatctcaagattccacggttttttcagtgttttctagaactgatattagtcagagggaaagtgggtaaggctattactatttgaactctttcttccaaaatccacaaaatatatattaatttagagcttatcttacttctggtttacaatgctccttcccagagagtaagatttttaagcttttagaggccagttcatgtctctaaaagaccagaaagttctggggaatcccataatgaacatcctttcattggaattggagaccctggcaatgagagattccatgtataatgccctagagttggattaggtgcactgtgagctcttgggtggtgagtctgagtaaggtggtttgtgcagcaaatgcaaacacattcatgggacccaggtaggaacaaaagcttccctctgcaaagggagtgtgcacctgaagcagccctcacagaggtgggcactgcttgcccttgatgagtgcacattagccagaggcatgatcatgattggtcttgcagataaagagcaccactgaggtcataggttatgaaaatgtttgtcatcctccagctgagcaagtccatctgcttgtttgtgggtgtcaactccatagagggtgcactttgggagatgacaagatgcgcacaaacctgctctcactaattatccactaccacacactcaagaccaacctgtgctccggaaaggaatacgtgcctgtggaaatagacagagcttaagtattttgtaacctggtgaacatactgcccaaagccacacgtttcaggaagattagctcagaaatgttcaccaattgactgaagggcagtggtgggtgaggtgatgggacagcctcagggctgcacatgaggagggctccctcccccatgcaggcttttcctccaggagctgcatcaggacctcaaggaagatcagggagaattctgagaacacccttctgtggagctgcctagagaagaagaataaatatgaaaaaatacaactctgagtaatgcatggatatttgttcatgaaaactctctctgaaagcttgtgaaggtctcgaaatacccctgattagctgaagacaaacatttaaaccctccttccacagggagttcaagcaggctggatgtgtccttctatggatgatcttccccaaccccttcctcttcccagctcatccctggctctctgtgtaaacagttctcatcagtggaatgtggttgatgaagtgacgtcttcaatttcctcatcttcttggtggtcatgttattttttttcatctgagggttaaaaactcacctgcatgcagcacatgacaggctaaaatctcttgtggacaaaacggtaacaaaggcacccaccagggttgagcatccgtgttgctgacaacgaccaccaggggtcaacgtcctcttcacaatcctgtgtcagagcatcactggaatgatttcattagcaacttcccaggagaatcagcttaaaaaatacttgtcccattttccatgcagatataacccatcccttttcctgaagaaacagagctcaatactaaatacactgaatgttgtttttgctggttttgtaagtttgtgactttatcactttctaatttctgagttaggtggaccactctacatatttctctcatgggtgtgaccagccttctggatgtcaaatataactgactttgttcgtgtaaatgtcaacacaagctcttcatggtttcggtgctcactgactactctaaacttacacaatgtgtttctttattagctttgttttctggtatctctacgtggcttattcatcacgcccattttatgttacttgtacaggtaattgattgttatttttaaaatttactattgcttactttaattaaataagtaggcaatagcttagaatagaaaataaggtaaagtaaaagtacatgcagtaatatttaatataagtaagcaggcagctgaaagcaagggaaatctactctgctgtgtaaaagggtatggagacctcacagtatgatgatcttctgcagtttaatccatactgctacataagtgacaacgtccactctgtttatatcagagcttcccctaatatgtacaatgaagactgagcccaggtacctccaaccagaatggccagcaccttttaccaagtgcctgaactgacagcaatagagatcacgtttgtctaaaaaaaaactcacactgtaaggatacccaccagtcatatggagacaattagaaaaaattaaagcccaagcctgataggtagtaatttgtacttagaagaattaacttttatctccacatgttttttttttaatcatagagaaactactagtggtagttccactgtccaagttactgaatatcttattcctagaatgagacactgcacaatgtgttctgacacgacagaacgtagctgtagttaagggacaggagatgtgatcacgggaacacgagtctgcgatccagcagttcttgctccttcacatttgcccagaaacaaagaccccagcagaacaatggaagcattgacttaggtctccacagtctgatgtgagataaacagcaggtagtttatgcctctgttttatagcaggaaatttaatctctaaagaagggccattttggagataatactattctccaggatgcttaaatgcccccaaacagagagcactgcagagccccgtggccaggagctacaacacctgggtctggaaaccactggacagaaatatgagattctcttaccacatgtatgatggaaccttgaagaatgtttccttccttctccataatcacagcctgcgatgaactggaggtcccagtacataaaaaaacatgtgtctgcattggatacagaattagtcccataaaataattgtgctactgtggtgctcacactgttggaccagctgaccaagaaagtgttgtaagagctgcagtgtctactgattcctaccatatttggggctacattcacatctatcaagggaaagagagataagaaaatctctctaggccgggcgcggtggctcacgcctgtaatcccagcactttgcggggccaaggtgggcggatcacgaggtcaggagatccggaccatcctggccaacatggtgaaacctccatctctcctaaaaatacaaaaaattagctgggcgtggtggtgggcgcctgtagtcccagctactcgggaggctgaggcaggagaatggcatgaacctgggaggcgtagcttgcagtgagccgagattgtgccacttcaactccagcctgggggacagagctagactccataaaagaaagaaagaagaaagaaagaaagagagagagagagaaagaaaaataaagaaagaaagaaagaaagaagaaagaaagaaagagaaagaaagaaagaaagaaagaaagaaagaaagaaagaaagaaagaaagaaagaaagaaagaaagaaaggaagaaagaaagagaaagaaagaaagaaaaaggaaatctggcctagtctattgatttattttcatttcttcaaaatgaggtaaaaaaatcgcatcaactaaaatgcggacgatgatgaagtgatcaaagacaacagccactcagtgtttcaggtgtgttttaacccaaagtcacacaacatgtgagaagctgaactccggagccaggggcatctctgaggagaatgtggaaggtgggcgggaggaaacagtgattcatgtctagggaaatttcagggctgcctgctctaggggaaaggaaagcctgagcctctcccacagtgtgctctgttaaaaattttggctgacttattgtattcttcgacacaaatatttttgtttcgtcctcttttaaatttttttatctctattaaaattctcactttgttcttgcatgctgccactagcttattaaacatgtttctaatatttacttcaaattttctgccaggacatccatatgtttttttattcattgatgccagattctggacctctatgttgtctgtctgtttggaccatgttcccgtgtttcttcattttccttgacggtctttcttgctatccgttcatcataacaaacagctctttgctcatcataacaaagagccacactcttccaagcctaggctcatagagacaaccctcaccaatcactccatcagtgattgcggatctctcaaaacttcataatgacttcataatattccaacttctgtctctgttcttagtggcccccaggtttagagaacgttgggttgtgccaggactcccaaataggagaggtagaaactatatactcaagtagcctcttgaacagtgtaccattagacacagttttattattgaggtatgattcatcaaaataatgttagttcaagcgcctctcaaccagtcatctaacattgaaatgttataatttcttatttggatctctctggagtttatcttttgaatatttaggtaaaattacaaactagtataaagctatttggcaaaattatctgctgcagaagtttcatcttctgtgtatctctttttgcacttaaatatgtttttattagtcatgtatccagaatatagaaatatgtcttaaagttccttcatttttttaaggttatggggttttcagaagaggtgagaaccttctttatttataaaatacctgattccacattgctggatagtttcttctttaatttgtctcctcctctcacattatactatattaagcaaggagaaatcaaaacacaccatccacactttgcttagaaatccccaaagctaaattttaagtatcacttactaattctaattttacccattgtaacttaattaacatgaaatctataacaaggttacacatactttcccgttctaataccatgttcgtgacagaaacaaagcaggtgtcttctctgcaatgtggtcatctgaggtctgagatgaggggtcacacaggtattttataatatttaagggtttggacaacagtagtgataacaattctgaacagcactggctcctaattgaaaggttataggtaaatttaatgctgcaattttatattaacaccttgtccgaatgaagctcagaggaagatgccacatcccaggtcacacagtgaggaggaatggagctgtgctctgctctccacaccacctacaaatcccaggccccagcccaggttccactggcgcacggcacctagagcacagttcccaggggatgatctcagggcacctgcttcctcgggcagggcgctgccttctctcagttgtgcacttgctcctcctgcaggttctgtagtgagcacttgcattgccgtgatttatacatgttctctcccctaatatggaaaaaatatttattaaattttcaactcattttctctgatgcacactgcattagcagaaaggaataaatcacattccttatcctcccataaagccaaagattcccgaagacagagctgatgtgatgtactcataggtggatctctgcccctcaagggaggccttggtcttcaagtttcagtaattctaggaagcgaaggacacctacatctcctgctccctgctctgtagctcacctgagaacagctttctcattggaatgtcttgtgtttaaggaataagagtccatgtttcaggttcgggagcccaggtgcacctactggatgcagcccaggattggagacactttccagaagacaacatcacctgagacatgaccagtcccactgtttcactttcacaatttcaacttcctcagaagaaaattaaaattgctgagacttgttcataagtgttgtgccatgtccttactctgttttcttgcctgttcatttatgtcataccaggtgtctgttatatgtaataagatcaaaattctgcctccagtaacacatcaatggagacctttgattgtacttttggtttatgcactgacacatagattatgatgttcatcacattcatttttatgtcaaaggaaatctgcataatctgaatgccaatactttttggaatctgctaagtaactgaaattgaaaaaaaaatacccactcaagaacctggatagacagccatgtccagaatggcagttgacacttgtttaactggaagagaatctacagaagccacaagttgttgagggcacttacatgataagcactatagttgtcttaaagacagatgtggactcagtaaatgtgactgttccagagggtcttatatttctatgttttatggactttctcaccagaaacctccagattctaaaaaatactatccaaatacgtttcttatttgtcagattggagaagattaattactgaaaaatattacgggagactttttcaaaagcttctacatggaaggacttttcgagaaccttgtcctatgtaaaggaagacaaatctcccattccagatttctctcccattcttccattattatagaaatgagcaaagttagccaataggggtaagatgtaagtaaatagtccagggacactgaaaccacaaaagggagtaatggccaaagtagcttttcccctggagattcctggtcaaagtcacagcccagaagaggaagccgatcgcatctctaggtttccattgtcaaaacaggcagtgcttgcctgcactgcacaatccattctaaccagtgtgatagctctggattaaagatggaagtgtggcaatgcacagactctatgtgagaagaacactggaaaactaaaggacaaaggcagagagtaggacaaggacgacaaagcaatctgaagcctctgacatcaccatttttaagatcaaggtcttggaaactccctcattgacctttagatctctaggagaaaaaagtcagatacctgggcctagtgtcagtgtaggaggaattttctataggctaggcattaggaagaagggaaaattcttccttattaggaagttattgttatagtgttatagtgttattggaatagtggatatggagtgggctttcatctcgatcaatctgcacctgctggtattttccaatgctacattcacctgcaagagcccaatgaagaaagaaggcactcccaaatcttttgcaagtttttgtattcactgtgggtccactgcttaagtgcatctggagcttcagagaaggggctctgtcctgtgtcatagaacccttgctttgagtctcacggcagagttcaatctgtttagtaaagttgatcaattatttcaagagatggtgtcaccagcatatggtgtcactgagggagtattctacactagcacacagccatttcacgctgggctagagaagctggggggaaatgctttgtgagccccaacaggaacctccttgcaaggcaagggctgggcgggagggggcactcaggagccactcagcacgggttccagccctgcagctggtgcacaggaggctgctgagaaggtttcctctcaggggctgggtcttcctttgggagaaaaaagctaaaattcaataagttgctggtgtgcccttaaatattctatcacatctgagctgctcccacaattcaagagaaggagaactatctttataaatattctatcacatctgagctgctcccacaattcaaggcgatgagaactgtctttataaatattctatcacatctgagctgctcccacaattcaaggcgatgagaactatcttttcaaatattctatcacatctgagctgctcccacaattcaaggcgatgagaactatctttttaaatattctatcacatctgagctgctccaacaattcaaggtgatgagaactatcttttcaaatattctatcacatctgagctgctcccacagttcaaggaatgagaactatctttttaaatattctatcacatctgagctgctcccgcaattcaagacaatgagaactatctttttaaatattctatcacatctgagctgctccaacaattcaaggcaatgagaactatctttttaaatattctatcacatctgagctgctcccacaattcaaggcgatgagaactatctttttaaatattctatctcatctgagctgctcccacaattcaagacaaggagaactatctttttaaatattctatcacatctgagctgctcccacaattcaagacaaggagaactatctttttaaatattctatcacatctgagctgttcccacaattcaaggcgatgagaactatctttttaaatatactatcacatctgagctgctcccacaattcaaggaatgagaactatctttttaaatattctatcacatctgagctgctcccacaattcaaggcaatgataactatctttttaaatattctatcacatctgagctgctcccacaattcaagacaaggagaactatctttttaaagtcggcttctaagattataaataccttaatagtgagaatatgaagaatagggatggtcttactaattcaatgcagagagaattatgggagtcactatatttccatgaataataatttcagatttcaggctggggctggtggctcatgcctgtaatcccagcactttgcgaggctgaggtgagcgggtcacgaggtcaggagctggagaccatcctggctaacaccatgaaaccctgtctctattcaaaatacaaaaaattagccaggtggggtggcatgaacctgtagtcccagctactcgggaggctgaggcaggagatttaatcctacaagacctacagcctcagacaatgctgctgtcagtgatcgtgggaagcagagtttgcagtgagctgagattgtgccactgcactccagcttgggcaacaaagcgagattccatctccaaaaaaaaaattcagatttcagtgttaagtaaagttgcctacattgtgtgagtgacagggcagtggtggatccgagagtgtggatctgagagtgagtcagaaatcagcatgtaaagatgaggatctatgcacatgaactgaaagtatgtaaacagttcatgaaattctaataaatccagtaggaaataaaacccaaacttatccaaaacacaaattcccttgaaattattatgggagcatgagttcataaagaactcctaactcctgtttcaacttctgaatcctagtgtccatgacataagaaaatcatctccaattatgcatcacagggcaaatctgtaaactaagagtttttctgttgacgatcctggggaatcaggacaccaggaaggtgctggagaaactgtctcaggagcgccccagggatctcagaggaacgtgctggccactcacgtgggacatcagcgtcacttgctcagagtcatcagtgagctgtgctggtgtctgacgggtccagcatagggccaaggcacctgctctgtgtcatggaccgagatggtccccagaatgatccaagtggtctctgtgctaatctaatgtagtttcacagtgagaggccgttctgagggggcttcttcttcagtgaaaggacctctgtccacaaatattcctaaatggacaggggcatgcatttcctcaagcaggattagggcttggaccatcagcatctcactcttgcaaggctgatgtgtcatttgtcttccctttcttatcatggatcaggctttgagctatgaaatgccctgtctcatgaatatgtaaatacctgagatccactgaggtaaatatggtctgtgccctgagagcttcacccaacaatcacatcccgcctctagagaatcccccgagagcatggctcctcaccatggacaggacctagagctaatcttcctggtggcagcagctacaggtaaggtgctcccaagtcccagtgatgagaaggggattgagtacagtcaaggaggctttcatccactcctgtgtcccaccctccaatgggtgtctgctcccaggtgcagctggggcagtctgaggctgaggtaaagaagcctggggcctcagtgaaggtctcctgcaaggcttccggatacaccttcacttgctgctccttgcactggttgcaacaggcccctggacaagggcttgaaaggatgagatggatcacactttacaatggtaacaccaactatgcaaagaagttccagggcagagtcaccattaccagggacatgtccctgaggacagcctacatagagctgagcagcctgagatctgaggactcggctgtgtattactgggcaagatacacggtgcgagaacccacatcctgagagagtcaggaaccccagggaggaggcagctgtgctggcatggaggagatgacaaagattattagattgaagactttcttagaaaatagcattaagtcatttacgaaaaggaacaatataaatgtgtatttgagaaattgtaattatttgagagatttcttatgcaacatttattctgtaagcaaattctagggattggagaattaatcaaattaataaagctgacatagaaattcctctgaaggtatctttgtaaacatcaatttctgaatcagtgttgtaaatgttttggaacacagacacaagatcacattttaactctacttttgtctctataaaaaatgccaaaaagagtctcattttgaccatgtacctctttgaattcccaccatcaatgaatgattgttcttgggtttccacattatattaccatttatcattatgagaattgtgtgttttaaccattataataggtgagtaatggtatctaatttttgcttaaatgcacatgcccctaataaaattcatatttaacaattttcatataatttttggtgagatgcctctcctgatatttggttcattttcaatagcactgttttcttttgattagttgtaagtttacttgcatattgattataaaagttaattaacaaattaaaagaattcatttaacaaatatgtgacttggaagttgcaggggtttgtcctgcacaccctgacacaatgacgaatgaataaagtgcactgacacaaagatattctgctttgccagctcgactgagcatctgggccacttagtcacagccaccgcctcgatcagtcagggagacttacatttattcagtaaagattaattgacaaaggccgtgagtaaacaccactagaaggtaattgacattgtggacctcttgagtggaaagcaattaagcacccgcggtagatcaaaggttagtcttaggaacacatgagtaaacaagctagttagataagctcctcacattcctttgtttctactctactttatgtaactaaaggtaaggggactaggctgccttcagccagatttattaccaaagttatgcaaactcacaggccttccaagagggtttgtggctattagaactaaaatgtttcccaccagcctgactggaccaccacatctccccattttttgttttctacatcaggtcttttggattggagcgtgcagatatgcgcagcaacatgtctgtcaggtgtggcagtcattgctcttattctggctttgcatcctagaattagcaaataacataaaacaatcatgagtagaattagcaacattcttttccagtcagagtgacccccaggagcggggtctaaccaggagagatgatctcacacacccttccatatgactgtttgttgggggtgtagatctattgcgtgaagagattctaaaattttagtttgaacttactttacgtctgctgttaaattgtcatgaaaggttccccagaggtattgttttacctcatcctaactatgtattgatagattccgtggtagagaagtgatacagatatgttcatgttcccagtcacagtttaaatgctgtcagaatgccactgcatcttgtcgctccctgacatattctaaagcagcctcaagggctagcagacgtgtgataattttttgatctataccttgctgtaagagaagttcattagacacatttttggccagattatctaaaaaggcagcagtttacactaagtcaataatacatgcaacagcaacactagctgttgccaggatgactatggctgagactataaaggccataagtgtaactatgaatcttttgtgtctgacctgggacagggcacgttctaaggttgcaagggcataggaaccttgccaattgcatgccagattgactggtaagaatgcctcagattttctctttaataccatggcgctagtaatttttaagttagatatactgtgattagtgatacatgaggcaaaccaagcctgtccctgcatccaggtcacaaacgtggagttttgaggtgtaatggaaatgttagttcccataaggaaatcgtatggatgggtagtgcaaattaggcactgatcagtgtgattatgaataaagcttatagcatagttgcaacgggaaatatggtatgtcccatgccaggtgttaagggaggtgctaagatgtcccagacaccataaagtaccttggggcggcatggactttacttggggccttggatatgccatccccccttggcacaaattataggggaaaagacatggctatgaaactgattgatgctctgatggatgaaggtattagtaaggctgccctgcaatcagccgctgggactccagtctaagatgttataattacctaactggaggctatgggctcgtctcccatgacagacctcccagctaaagtcgaaccgattactgtcccagctttgttccttagcacaggaaggaatgtttgggaaagaagcagcggcatggattgcattgctcagtttgaggctatctgcagctaagaatgttaaggcatttcctttgctatgatgtaaccatacttgtttttgggcaggtacacagtaagggttagagtctttataacttacacacactgggaggataatagtggattgacatatagtgttatctgccaccttagtccattgtgtgccattattgagggaccccacgtggggtaaatctatccctcctagccaagcagtcacgttactataggctgggaagggagtgtcttcccatttggcagggtgaaagaaaggtgtgtctaagatagaggcccaatagagtgtagcaggtacaggttgcagacaaagtgagagcataaaaaggattaataccctacatgagttgcaatgtacaacagaaatcatagcaccaaacacattatctggagtaaatggtgtctgcatttggagcaggattcgttcagcctcctgagttgtccttttcagtaccccccaggtaatgtctggggattgtgttgttcacagaagctgcatcgtccggggctgtaggtcttgtagggttaactccttcatttctggtactgggttgggtcctagcaatgtcctggtatggtttgatgcgtcgtgctggaacccaaagacgacccgagggggtgtggatacaagcgtaccctcttccccacattaataattcacttggaccacaccattcattactgtttacatctttccataaaactgcaggtttcatgtattgggaaattttagcaaagtgcttttctacagcggattcaaatttgtcttctaaattaaaaaaataaggtttgtgccaaaagtgttgcagggtctgtacccatactcccctgtttttgttttttgtgcatattttaagggtggagttggcaagttctactattgcttgtccttggggtttatatgggatacctgaggaatgtcggatattccacgtgtgacaaaattgttgaaattgtgagctggcctaacctggacaattatcagtcttaatttttgcgggttgttccataaatgcaaaagataaaagaagatgtttaatgacatatcgagtaaactctccaggcggagtatgtgcactacttaaatgagtgttgatatcaaaggatacatgtacctatctaagttttccaaattcagggatgtgtgtaacatctgtttgccacaacagattaggttctagggttaatacctgttgaaggaggagacgtgcctgtgagctggcgatctcagagactgtttagccagtctctgtataagttgagctggcgatctcagagactgtttagccagtctctatataagttggaattgtttagataagtttttccaattttggtggaaaaattggtgcaattgggtggcttggtcaagcagcgatatcataacttgaaggttggcttgattattgtcataagctaatggaccaggcagtgagctgtgggctggaatgtgtgtaataaaataggatgtgtactttgatttagcaattgctgaaatcagagaaaaagagtccacagggctggctccagagttgacttaattagggctgtaaaagttctctagacccaatattaaggactcaactttagctttctgagtgctagtaaacccagattgagtgaatgaattgtgtggtgtccaccagactgctgcttttccatatttaccagatctatcagtaaacagtgctaaagcattaaatatgggggagtaaactatttttgtaggtaacacattaactaggccttttgggaatgatgaaaatgggtaaattctaagggctgttagtagaatattacccataaaatgaataatcttgtagccaggaaactttttcctactagggagcaaagcttgcttttaattgctccctaactaacttaggggctttttgtaatgtctctccctttagaggttactgttttacttaaactggatttggagtcatgttaggaataagagagagataacagtggccattattagaaagaggtttctcaaattcttaaattttacttaactcttatcatagaattataatctgggatgtcgcttgtatacaaagaacataacaaattttgctttgggccgcctgcggagccagagagcggagcaggtgggtcccagggcggctgcggctttgtgcttgcttagaagccacttttcgccaccgcgtttcctctgtgccagctccctccccacactgctcagcagctgctgccggcagaggggagcttcctgcacttgctcctgcccctaatgccttttcttaacccttcgtgtacctgattgccttgctgatcttgcattactgggcagtctaagagctccccttttaatgctgcttgtcgaagacagggacatatagctgtagtgtatttcctctattttttctatctattgaaagagggggctcaggcaaaacctccgtttcctctttgttattttgggaagagcaggtggtaaggcaagtgacgtttcttcctccttcccctttttgggttcttctttgtataatgggactaaagccatccctactaaagcccatagtgttaaagatgatgctgggacccgttgcgcttgtgtgtaatgctgttcaagatttctccctacttgttcccagagctttacttctagctttccttcttctgggaccacagattatgtgagacaacagttttcattaggtgccttaattgagcctgcgaaactgatgctcccctagccttaagcaactgttacaatactttcatatgctgtttgtgttgagctgataactgctgtcccatgatgaaatctcagcctgaacaatctcccctgaacttggagatcccaagtgggcaccaatgacttactgttttactgacttgaccacgcagtcttcctcaaccttcgttttcatggggtctgtcacgctccctttgcagcgatcctcacatggggcaccggctgtgggggtctgtcctgcaggtcctgacacaacaacgggtgaataaagtacactgacacacagatattctgctttgccagcttgactgaccatccaggtagatcaaaggtgagtcttaggaccacatgagtgaacaagctagttagataaactccccacattcttttgtttctactcaaatttactaaactaaaggtaaggggactaggctgccttcagccagatttattactgaagttatgcaatctctcaagccttccacgaggacttgtggctattataactaaaatttttcccacgagcctgactgaaccccacaggaagtattttctccaagtctgtggttgccttttactcccttatcagtaggtatcgcagaaaaatgtgtgtgtttgtgtgtgtgtgtgtttgtacaaatttagattgaaaacatatataattttattcattcatagatcatgcctttggcattatatctgaagtttcattataaaataaactaatagtcattattttttccatatctctaatctcaggccacaatcaactcatgagtgtttaaacttcacctgcttgattggaggaccatcaatctaatgtatttggaatacttctgtaaggagatgtgttcttcttcctattattttttaattaatcatctattaatatcagtattggttgatggatgtccattttatactttgaaaaagatccatgctacatcattcatttaattgttcaaagcaccacagctttattaggtgctgggagctcattttgtttgaatcctgcatccttacagcacacctcatatttttgtttttgaacacttgcgtatttcctggtattaccataaattctaagcttgttttctttattacctttttttacatagaatcaaccacttttataaagattgcatgtttctgatgttaaagaatagtattaaaataaaacattgtgatactggctctgtgtgttgttaatgtggtatgagtacttctagaacctctcaaacaatggtcccagtaaacgtgcatgtttatgtgaacccaagtttatggactcattgaaactatttatgtatctaatcttctgtaaccatatcacattaaaaatgagaacacactggtctctccacccaactatgttagcacatgaacctttctagtcttctttctttgcgtttccataaccacccactgcaaagtgagaaaccccattccaccatatgtaattttattacttagctgcacagtttcaggacacatgcatagcagtatcaaaagtgtaaagctgtgcccttgatggaaccatgtttatctactagaatagagtgcttatgtgcagattttttacacattaaacttatagaatttcttcgttttctgagttgcttaggtcagcaacttcattttccacattcttcaatgaagtcatttcaattacattgtataatttcatttatttgaaattccataaatgcttagactatagtcaagtaaacagacagaggatgttccaggaatttagagagtgggtataaaataagcaaaaaaaaaaatgtggtgtttaggaaaaataaaactatttttagtgatatgcaatggttgagatatgatataactaatttgtctaagctaataattttgtgatagaaaatataaacttaaacatattcaattaaaaaaattcagcagttcattaaccccaggattaaatgcagactgtataaaattatccaataacttatttggtgagagtggggatgttatgagatacatgcaacaaagaatgaagtaattttccccatttgcatatacaatgtttccattcactgaagaccttttattttaaaaaaatcaattttctaccttacccttgtttttaattcccgacaagcaaataacccaaaggattcttttctttcattggttgagaaagattttcccctaacttcagcttagttcaggcatacgctgacctgaatgggcatttaccctcagatgggtacacacctgtcaatatgtggactcttctgtcagacagacacagcttcactcatgtggattcttccctcaaacacaaatgtccccacatggactatttcctcagactaccacatatgtccttacatttacactttcctcagaaaacagacatttcctcatgtggactcttgtctcagataagcaaacatgtctcagtgtgaatgaagtcttcactcagataagtacacatatttcaacactgactgtttcctgacacaagcacatatgtccaatgttaaactgtcttgcgacaaaatgatctcaagataatgataattataaactccaaccctgaaaatctgtagatctgcattttgtctattgtaacataacttcatctcattgtcagaaacagtcgtttgcagctataaatgcactgattacagtcagatttccattttctctggaaatgtatttcttatgttcttactggactaatttgttgataatgtttgctcacatgaagatacctgaacagtgtccacattagagaataaaaaagagcaatgggcagattaaccctgtgcatccagacgcaggaaccatttgactctgccttccctgaaatggagacacagaggatggatgagcaacgctgagtggtgcacctacgaccacaaagagaaagacctggaaatatgtcccatcccctcctcatgaaaggcagctcatcccctgttccttcaggccctggtgaggagccaccccatatctgtgtctttcttcagtgttcacactatggagtctgcactgatctgggtttcccttctcatcaccctccatattagtgtcccttgtaaatcaggtccagctgtggctgctcatagggttgttctcagtctatttcctctgtgttcatagaagtcctgtatgaagttcagtggtggagtcagaggggtaaacgtagtacagcccagtggttcactgagactttcttgcaaagcgtctggattcaccttttctggcaacagcctgaggttggtccagcaggcttcacaacagggattgtggtggctggcaacagtgagtcaacaagtgggagtgctcaggtttactcttcatgagtacaaataaattaactggtccagcgacaccctttcacgtgcactctaccttacaatgactaacctgaaagccaaggacaaggttgtgtaatactgtgagcttcacaggagagagattatctgcacaagcccagacacaaaaatctgcagggagacaggagggaactgcatggtagatgctgctcagaagcaccagggggcactcaacacaagggggcgctcaggacaccaggcggcactcaggatacagctgggggcgctcaggacaccagggggccactcaggatacagcggggggtgctcggatccaccagggggctcttagggcaccagggggcattcaggaccactagggagccctcagggccaccaggaggacctcaggacacgtcagcgtgctggagccaccgggggggggggggggggggggcgctgaggaaaccaagagacgctctgaaccgcgaggggaaggaagctcaggaccacgaggggacgctcaggacaccagggggcgctcagaacaccagtgggcactcagaacaggaagaatctcttagaaagcagctccacatcaggatcctgggaggctgtggagaaatgggaacactcataaactgttgagcatttaaattagtacaaccactatagagaacagcttagagtttcctcaaaacctgacgatagagttatcatataatctggcaatcctgctgctggtatatacccctaaaaaggaaatgtttttgcactaccatgtctgtaatagcactgttaaagcactgttcacaacagtcaaaatttgaaagcaacctatgtgccgattaacacatgaatggataaataaaatatggtacatataggatatgggttaatatcatgccataaaaaaatgagattttgtcatttgcagcaacatggatgaaactggagttcactatattaattgaaatgagcccagaacagaaagacaaaattcacatgttcccatttatttgtgaaagctaaaaattaagacaattgaactcgtggagatagagagggaaaagatggtcaccagaagctgggaaggtctatggtagatggggattattggggatggtcaatgggtagaaaaagtgattagaaataataaataacacataatattttataacacaacagaataaatatagtcctcaataacttaattatagattttaaaataaaagtttatgaatggaatgttggtaactctattaatgcttgagaggatgtataaaatattcttcatgatgtgattattatgcagttcatgctgattcagagtcctgtaccccataaatatatacgtgtactatttacccacaaagattcaaaattaaagtgtttatgtgtctaatattctgtaactatattacattaaacctaagaacacactggcttttacacactactgtcatccacatagacattcatagccttctttctctgcttgtccataatcccacactccaaaatgagaaaacctctcctaagatatgacattaatttacttagtgcacaatttcaaaatacacaaatcgtctttaggattgttaaactgacccttgttgaaaatatgtttatcaactagaatacagtgcttatgtggagcttatttatgttttacaatcgcaacatcaaattctttccaagtctcttgtgtccaatatttatgccccaccttcttcagtgtaattagttcaaaccttctgattgttgttagatatttttatacagctgtctttttttgtgtttcatgacctgctaaatactttcgaagttgtatgcatttaggttaacactttgtctcaaaaaatatgagttttcagaaattctttatgccatgtgtccatcattgaatatcataaaaatagtttcattggccgggcgtgttggctcacgcctgtaatcccagcactttgggaggccgaggtgggcggatcacgaggtcaggagatcgagaccatcctggctaacacaatgaaaccccatctctactaaaaatacaaaaattagccgggagtggtggtgggcacctgtagtcccaactactcgggaggctgaggcaggagaatggcgcgaacccgggaggcagagcttgctatgagcagagatcgcgccactgcactccagcctgggtgacagagcaagactccctctcaaaaaaaaaaaatagtttcattgggattaaaaagtgtgtgtttcacctaatccacacaccttctccccaccttcctgggaaacctcaaatgtttactggatctatatttttatctttggcaaaacagcctggctgttctcttagcctcttttgcaaagcatcaagattcaccttcactgactacagcataaattgagcccagatggctgggggacagaggctggagtgggtggtaacagtgattgattcaagtggaagttctcagtgatattctgcatcagcataatgaagattcacaattcccagggacaccaattaccagcacagtctcccttaaaataatctacttggaagctgagggggctctcacaggggtaggcagtgtattactgtgagagacacagcgagggacatttctgtgagtccagacagaaacctccctgcagggagacaagagaggactttgtgataaatggtgcttaggacaccagggggcactcaggacagcagagggtgctcagcagagcagggtgcgctcaggacatggtgtgtgttgtagggggcattgctcaggatcaccagggggctctcagaaccaccaagggtcactcaggaaaccagggggcgctctggacaccagggggagctcagaaccaccaggtggtactcaggacaccagggggcgctcatgaccagcagggcatgcttgggactctatgaggcatgcaggagaagcaggccgtgctcagggcaacagggggctcacagaaccacctgggggtgctcagaaccactaggggtcactcaggacagcagcaggcattcgggacaccatggggccctcaggacctgcagggggcgctcagaacaccaggggaaggtcagaaagacctgggggcacttggaaccaccagggggcactcaggacagcagggggcgctcaggaccactagggggcgctcaggaccagcagggggtgctcaggacaccatggggcatgcaggagcagcaggctgttctcagggtaacagggggctctcagaacaacctgggggtgctcagaaccaccagggggcacccaggacatcatgcggccctcagaacctgcagggggcgctcaggacaccaggggaagctcagaatgacctgggggcactcagaaccaccaggtggcactcaggacagcagggggcgctcagtaccacggggtgcactcaggacagcagggggcgctcaagacacagtgggatgctcaggaccagcaagaggcactcaggaccaccagggggcactcgggggagcaggaggcactcaggacaccagaagaggatcagaaccactcgggggcactcagaaccaccagggggcgctcaggacactgggggcattcagaaccaccagcaggttctcaggacacccagggacactcaggacagcaggggcgctcaggacaccagggagggtgctcaggacaccagggggctctcagaaacacctgggggtgaccaggactagcaggggcatgcaggacaccagggaaggggctcaggacaccagggggtgctcaggacagcagggggcacagaatcacgagggtgcattccagaccaccaagaaatactcaggaccaggggtaacagaaacacctaaagacacacaagaccaccaggaggcactcacgactgctcagagtgctgaggacaccagagcttcaggacgaacagggggtgctcaggccaccatggggggctcaggaaccaccagggtatcactcagacaacagggttctcttaggaggcagctccacatcaggtgcctggggagggtcagatttgcttttagaccttgctgatccctgatctggtcaagcgaaaaccttcccaggatctctcaccatttcttccttgtaacccatggtttctttcacgtacaaatcattaacttagaacaggaattcaattcaacttttaaccctccatatttttagaataacactagcagtaattgaatgttttgataataagaaattgcgtatgcctaattcaagctctggttccatgcatgggtttttgttttctttgctgtgtcagtcacactatagtcaatgcttttctaccaataactcagcataggcatagtgttaagtttctttttctttcatctgccttttgtggagatgaaacaccactttcagggctcagttcccccaccttggttgggttctggtgttctgctcctcacactatttctccaccttcccttcttctgtccaagccttttgtcttcctcagtctcctagcaaggaagcaacaagtccctttattttgcctcttccatgtctggtgaatctgttcacttctcttcatgatcattgaagtcaaccaagtttaggaggataacagttctccttagaatatgctcatctacctgcagactctctgccttcctcacccctttctagggtcctgcagacgtcacctccaccacatccactcctttacctaagtaccacagaatagtctctgcagctcctgctgctctctgtgtgctcagcactaaggctcactagtgctttgatgatgaagttcaaatccctaatgtgttagcaattctcagacaaccctgccattgtgagtgaattttggggatcctgggctgttttcagttccatattactggatgttctctagcatccaggagtactggcaaattaacatctagaatttgtattgcaaatttatacaaaatcaattgtagaaaaaaatcctaatttctaaataagaacatttatcctgacttttataaaaatacaatgtgaatttaaccaataatataatacaattttaaaagtgatgtttatcttatatgttattaagtttattaataattggctggtattttaaaagtatactgatagcaaaactgacaaataaaccaacacagattctatacataaataccattgtccatttaattaatgtgtttggccagaatggcatttacattcagttctaccgaggcatgtctttaaatgtatttgtttattggcattaggatagagaaacactcacacagaaaagcattatttgggactactacattatactataaaagagagtaaattcaattcaattaaataaataaaataaattgaataaattcatgttttggtttggtatttggataggtgttcatttttctattttcacatgtatatttcagtactgggcatatgtgtgtatgtgtatgcatgattatgaacttctaaaatacattactcccctatatagttatataaattgaagttttgcatgttaagagacagtagaaaccacaaaaggggaaaagttatagaaagcatttggaatacctagggcctacagaggagtcatattaaaatgaaaaataatagctgaatattttggaaatgacacatgcagtaagaaatgtctatatgaaattaacaggatattggcacaaaatttagaaaaaaataacatgattatgcccactattggtctatgatatgcctataataataacacattttatttatcatagaaaataaaataattatacaaatagcactctcattgcttgattttagtattaggtacttcacttgttttttgatagaaatgaacatttatcattttttgatgataatttctatattatcttctaaaattaatgtccataattatgattgacatgttataatttccagaaacctattttatcaattgtgacttgtatttttatgatagtatttttacattcatatacatttgattcagaataattgtagattaacaaaataatcataaagttaatacagtgtgttcccatctctaagtatctcctaagatgaacatcctccacaatcataaaacatggtgttaacacatttacgttgataactttaaatatattcaataccaggccttatttgagatttaccatttttccaataatttcttttgtaaaccaaaaataaaattctaagcttcctcatccaactaaatgaactcaactatcagccaaagatattttaaagtaaactttaaaacttgttccagcaataatgggaaaatgagaggtcagatatgcctcattatgtcctcctgtctttggaattaaggcacctgtggccagcattaacactaaaacaaagacccttagactgacaaaactatattttttctataaacactcttcatagtgaaaagataccaaattacaatatgattctagtatagcatcacatgacaaacagcaacgcctaaaaatctattctctatgaagtctgctacctggaggtttcatctacataataacaattatgagctccacaatctcgtatcttaatccagatactcatttgtaatgagtgtgtaacatttcaaccaattgccaatcagaaaatgtttgaattcacgtatgtcctggaagcacttgagtaagcttattctgcctttctggactgtgtaaatggtatagctcacatgtgttgattcatatctgtctataccttctgtaccactaaaatgtataaaatcaagctgtaaccaaaccattttggatacgtgtactcaggaactcctggagttgtgtcatgggccttggccactcatatatatctcagaataaactgtcttaaataattcacggtttgtctcttttagtggatactgtctttttcttttttctttctttttttttttttgttttttgagacaggatctctccttgctgttgtttttgtatatttgtttgttcccagattccaacaaggtcatcactttgaattgagttgtcatgttcctttattctcttctggcaaatcacagtttgtgtttctgaagttttctagtttaatattttatagataaaaatttatcaagtagattgatagtcctatttaggacacttatatctttacttatttgaacactgcttgtcaatcacaatgagtgttgatttctccgtcttctatacatgttattatattttctgttccaaatccattcattaagtatttttaaatgtattttggaaagttgatcctattactttatgtaatatttctcttgagtcccaaaggtcttctttttatgattattttgtcttaaattaacatagctatttaagttttcttttggtttatattttcatgatatatatttttccatctttattttttctatttctgaatatgtaaagaaattttcttggagataaataatagttgggtgtttttttttagtcaactatgaagaattattttttaatgatgttactcttttgtccaattattcttgttttaatttgtatttttacaataaagtttattgtttctattaacttattatttaatcattctgtgactaacattttatgggttaccataaggataacaataaaaagtttctataattgaattctaattcaaaaatttaattcccattcatatatactacagagatattataactctatatatctaattcctctttcctatcccatgttttttattttctgtttgtatctatacatgctataaaatgtaatattggcatttttataattgctttccacacttacataatgaacaaaatacaaatgcaaaaactgtatttcaacctcatttttccattgttgaccatcttctttgtgcatattttcaggtgttggatctatgtcacatggctattcatctagagactctgctaaaatgtctacggaaagattcatgtgctggaaataggttttctcaggttttattggtccgacagaatatttatttgtctttgatttattgtctccagagacaatgtcaagaatatgctatatctgcaaatgggcgatctgtaaaccaagaacacatcagtatatcactgtgcaagaggagcacatgagggaaagccagtgtgtgcccagacataaacctccagggacacatgggcgaattagctgcagggggagcttgggacccactgatgagagtcgaccccagagggaggtgcacagaaaggttaagaactgctttcctgccagtatatttttaaaaaaacaaaacttccatctgacagtttctccagagaacttccctaattttagcattctgtgcctaccaatgccatcactaaataggtttttaaaaaatattgtaatatgaggacatattctcatatggacaaaacgcaaattgacatttacagaaatgaaaagtcctcaaccgtggtcgctagaattggagacctgtagcagctcagtgggacctgttgagtcttctccaatcacactcagaacagagaccttagtgcatctccctgactagaataccctttaggtatcgagataacagcctaaagatggtaaatcatgagagtctcagatgtccagatgacagacatgggtctatgggaatagtactgtaactgacagtaactaattttccataccgccagatgtcctattcaggagcagctacagcagtcatgcctaggtgtgaagatcacacactgacctcacccatgctgtctctggccacttcatcacaaccaatgcttaatattggacgtggatctgccagtccccggggaatgggttgaatggataaaatgcatggctagtgctgctggaaacccattcctactgtggcaaatggcagcatctcttttaaaaggctaaataatattctattctgtatacataccacattgccattatcctttttgtttgtttgtttgtttgtttgtttgagatggagattcactcactctgtcacccaggctggagtgcagtggcgtgatttcaggtcactgtaatccctgccttctgggctcaaacaattctcctgcttcagcctccggagtatctgggattacaggcatgcaccaccactcccggttaatttttgtattttttgtagagatggtgtttcaacatgtttgtcaggctggtctcaaactgtgacctcaaaaaatcaacccacctcagtctttgaaagtgctcagattgcaggcgtgagccatagcatccagccacttttctgcatttttttttcattgacacttagattatttcaatatcttggctcttgtgaatagcgctgcagtaaacataggagtgcagatatctccacaaggtggtgattttttctatcttgggtatattcccagaagggaggttgctggtcatacagtagttctagttctaattgatttaagatcatcttactgctttccatagtggtggagattcagattagtgtagctattatgaaaaacagtttcaatgttggggagtgactgaaaaacaaataatgcttgattatggttctccatgagagtctctaataaacctaatggaagttcagaaagtttcctcaccttgttaagaaaacatttgttttgctcataattctctttcagcccagagttggcagtatgtagaatggaggctgttggctcgtttaaggattctgaagcaaagaacagtaatgagagatgacaatagagaaaaagagagagaaggagatgctgaatcatcatggactcattccacctgcaagcctttcactgtaaagctctattgctaaggatcctgaggattctatactcccatgaatgcataatcaggatccctcaattcaaattttattggcagagacacactgggacccctctaggatatgtgccctacattactggctcaacatgccgcactgagaatcctgcattaactggctttatttgtagtggtgagtaaagttcacagttttcagtcatccatgaaggggagattttttttttggttcatataatttttgcagaaattcaggtattagtgaaaaccaataagattgaggatttctggatattttagcaacactagggatgatggccattttgtagaaaaatttacatttttcaaactgacctacatgttaggctgacataaaaaaatccaactacacagcaatattatggcaacacttcaatacacttggtggtgaaatacctcagaaatgaaatgttacacagattaattgagttaatgaaactgttctgaactatgataaacatttgtttgcacccagatttgcttgaattcaatttgattattatattcagctgctgccctaacttatttgaatgagtaagttactatttaaatgaccctgtctgtttgatttgttatatatacatctgaattaaagaacttaaaggacaggtttgtgctattattagaaagagatattctggggggcccttgtttgctccaggaacctccacatttttaacttagaattaatataaattccttgtgaattgggtcagtcttcaagagacctaatctctaaaacatatacccagaaccttctccagacagaccatccagaggaagaatctttccagtaatttatctccatggtggaaggtccttcattgtcatgcagaaccctctgcccaggcttcctttattatgcaaataattaatattagccagtagggtaagattaaacaaaaatagaccggagatgctgcagacagggaaggaagtaatagaccaaaatcagctttattaatggagactgcttttaaaggtcacagccaagaaatggaagaggataaaatcaatgagatgaaattgtaagaaactttgtccagttcaatcaagccatcagcaaccagatagcttcagtggacattatgtgtattacaacatggctaaagattctagattacacaaggattttctctatagtttgcatattgacaaagtggaagatggcatgggagatctggtggcaaacacttaaggtgcaataatagctatttttcctatatcatgacaatacatggcatgcctctatattcatttcattccaaagaagtccttcagaaggtcaagtaaatggagaatcttacatgcatggcccaatgcagtctccaagaagtgattttgaatgtacagctacaccagttactgcaatgctgtgtctgaccttcccagcatctaagatattcatgagtatcaagggggagatgggtctaggtgaaagaaaaggaagtagtcattcttgagaagaatggtatggccaagataagcctgaactctctatcttcttccatttgctgcagcttcttattgcccgattgaggtcactcgcccatggtggtaatgacatcagcaatgcagtacattctctggtggctttgtatctggtttataatgtgggagatgtttcctcaagagtggtgacgccagtatggcttctgctctctggtggtgatggcatctgcattagcctaggggtttggagaaagagagttattcagaccatggggaagaatctgacactgtcacaccgcctggtgccttcagtactggactggctcctgccctcattggtgattgcatcaaatattggcctcctcatcagtacaacacattgtaacagtcttctttgtacctggctttaatccaagaaagttgttgacttatggctctttcattatattgtatggcctggtttgtcacaatctttatttctggaattatcagtgctgccatcttggctgacttcaagtatgtcatcctcacagtttgaagctgcttgacattaacatttttgtcaatgtttgggactaccttacatattccggctctctgaaagaatgattagcgttagggaaggctgacactaaatttgggagccagagaaggaaagtgttactgtgctacagttgttttgtgataaatatggttaggttaaaaatgagctatgtaatgtagccaggtttccactgagttccactttgcttcttggctgtctattcctgtgcaagtttctatatattttgtatcaggcttcaattccattatgttttaaatgttgtctctaaagataaacaaagattttttaaaactaccaaacatgcagccatttgacagagtgtgcgctgcatttttagtctcaccatcttctgccctaacaagcaccgaatctaacaacacaaatatcatggaagctttccttggagtagctcctgtaattagaatcattggtattctgccctcctgtcagtggtggaacgttctattggcacatgtggaaacctcttagagggatgagtttctttgaacacaataaaattttaagttaggaataacttatttgaaagcaattcattgaaggttattgctaagaagaagttagaagcagtcttttggcagtcatttcttcaagatgtatggcagcgtaggatggatatatgaagtggaataggaacttgggctagttaaatggaatagcctccaatgttaatctgtttaccttttaactgaatgaaaaagcctatagttgtaagaaaagaaaaaacaatacagtgctcccctgtcccacacattaccttctcatcagtataattaatctacattgaagatgagtgtggtaatgcagagactctatttagggaggagaacatagggaaatgcaaagacaatgggagaaaaaagtcaaggacagtagagcaattcgaagcctctgataccaatagcttgaggaccaaggtcatgactcaacttttggtggacacagagtcacttctcttagggaaactgcagtattctaaggtgacaatatgcaaacatgatgaatgtacacttgctacatctccaattgtgtactgttttccttacttctgtttgaagaagggagtcgtatactcaggtctagtatcagtgtagggggtgctccctatttgcaagatactagaaaaaaatggtaagttagaggcccattgttataaaaatctactagctccgtgtcagtgtgtgtgtgtgtgtctgtgtgaatgtgtgtgttattgaaacagaagacatggagtgggcattgatccacaagcatagatacctacaggcactcttagatgtaatatttaactgcaggagtctaaataaaataaaggattcgccaaaagtcttgaaaattttggtgctgactatgtgtccactgattcaatgcatcctgagttccagggaagggaatccccaattctttcatagagttgactgggtctcctaaggtcaatgttttcaaacgatggtgtcagtaacatatggtgtcactgaaagagcattttaaactagggcatggccacttcctatagccctagagacactgagaggtaaatgccctgtgagcccagatggaaacctccatgcagggcagaggcagtgctgcagggggcgcccaggacccacccagaacaggctccagccccagagctggtgcacaggaggctgcagagggagtctctcacaaggactgagtgttactttactgaaaaccaaaaaattataacatgctaaataagaattttatgaggactatttatgtatatttaaataccctaatgtatttagaaataaataaatcaataattcagtgagaaccacatttaaaaggcaaaattattactgctttgagatattttactagtaaaaagataaagaacaagaatggttttattaaataaaaatgtacacatttcagagacacactggtcccgagagtaagactgcggagagcaaatcctggaaagggcggaggctgtccatgtgccatgggaacttgggctcacgctgagaaccatgtccggtgtgagtcagcttcttagcggagaaattctcccttcacaaatttccgggcatataaagggaaacatgtcattaaataagaatgaagatttgtacctcagcatcccacagttgtgttgtccatgtgagatctattttctctttctcgtgctggatcaggtgtaatgctatgaagtagtagtcctcatgaatacgcaaatcacctgaggtgaacactacagataactctgtgccctgagagcatcacccaataaccacatccctcctctagagaagcccctgagagcacagctcctcaccatggagtggacttggaggatcctaattttggtggtcgtagctgcaggtaggataattctcagtccccaggactaaggtgactgggtccagtcaaagggggttttatccactcccgtgtcctctccacaggtgcccagtcccaggtgcagctggtgcagtctggggatgagatgaagaaggctggggcatcagtgaaagtctcctgcaagacttgtggatacacctaccttcaccagttactctatgcactaggtgcgccaggcccatgcacaagggcttgagtggatgggaaggatgtgccctagtgatggcagcataagctacgcagagaagttccagggcagagtcaccatgaccagggacacatccacgagcacagcctacatggagctgagcagcctgagatctgaagacacggccatgtattactgtgggagagacacagtgtgaaaactcatatcctgagagtgtcagtaaccctgagggaggaagcagctgtcccagttttcaggatatgacaggatttatggggtttaatgttgtttagaaaataggttatataattgaggaaaagaagaaatagaaagatatatgcattctaattatataagaaatattcttttcaaatctcaccctataagcaaaattaacagagtgggaaaagcagcaatcaatcaagctgaaacaaacattcccatggaggatttgtgggggcagacgttttaaaattgaatgggtaaatcatttagggcaagattgcttgatccaatactaagactaaatgtaatttctgagaaactgcctatctttttatattaaatttattataaagcagttttagggttacagcagatgtaaaaagtagaaacagagagctcccatgtacccctgcccaacacatacacagccctccccatgatcagctccctgaaacagagtcctaactgcgttatgtgggatgaacctacatggacacactagttctttcctttcctggtggtcccccggtataacaaacataaattattttgaagcgccacgggttcttcaagtgggttactgggaatgatgccagttagagggaaagtgggtggggccattcctttttgcactctttcttcaggaatccataaaatgcacattgacttagagctcatctgactcctggttttctatgccccttcccagagggtaagttctccaagcgtgggaggaaggtccatttcactaaaaggccagaagcttctggtgaattccataatgcacaaccttttttgagaagtggagactttggacatgagggatttcatgtatgatgccctggagttggattaaatacagcgtaagctcttgggggtatttctggaggaggccctttctgcaggaaattagaatacatgcaggggatccaggcaggaagaatcacttcctttgacatcgtttggcacctgaaggaagccctctcagcattgggcactggtcccacttgctggctgcactttagccagaggcctgcgcctgatcattcttgcagtgggagagccttactggggtcacaggttataaaaatgcctgtcactctccagctgagcaagtccatatgcgtgcttgtcagtgtcaaccccatgatgagtgcactctggaaggtgacaatctgcacacaaacctcctcccactagttacccactactatacactactttaaaaattaatacttataattatataatataatatatattatataactatataaaaatgattatgatgatgacatttggctgttgcaatttctttaggatctctgcatctctcttcactagacatgtaagtcttcaatttcttgtccctgtgacacgttgcccagtgtttgaagtcaaagttgtgccgagtacctgagtatgtcctcagagaagatctcagcaatggttgattgttctacagggacttttccaggagacctgtcccagggagtcatgaggttcctctggaaatactagcccctgcaggagatgagacggaagcaggagaatcaagagcaggtgacaacattgtcagcaggaggctccagatgctttccagacacagtgaaccttcacccacttgccacactgcacagggagtttgcaggggcacaatgaggtgcctgtctgtgggatgttgggggacaaagtgaaaacctgagctcagcatccaggaaagtatgaactccagccctgataatatgtagcctgtgttttctttccttctacgtgaacactttgccttattgttaagaacagaggattctagctctaagtgcacggattgcagacagctatgactttcctccgggccaggctcctcttaatgtacttcttggacttatttgttgatgaaggttggttccattaaataccaaaacagggttcatattaaagaaaaatgaaagagtgacaggtagattaaacccgagcatccagttccagtgattctttgaccctgccttcccaaaaatctccgatatgaacaatgacaatgccctccatggttagattatattataaactagattgagctagagtgtttggtgtattaagtcactattttttttagcttccctgttagttttttgtttgtgtgttagcatttactttaaaattctattaatcagttctctagtaggtagaaattcatctgagagtttcttctcttgttgtccactttgataagatttccagaagacataagaaccctttttgtttgcaaaaatattccaaagttttacactaactaggaacatatatacttaattctaatttttaatttgtttaaaagctctaataagtgcactgttttctgccttttgagttaatttcacaacacataggagaatatatcctaaatgaaagtttgtgctaataatacaaattattggtaaataacctctgttttaattattgaggtattatccattaatatataatcttaaattgatgttctcaatgggactcttacctaaagaatatacaaaatattttcctgatcttgacataaaatagatgtgaacacattcttagtattcagccatgtctcctgtctatcacattatgaaccacatgctaactttgatttacttgggacttgttctaatttcaaactagttatttttttatcttcatgcagctggattattatgtgtggctattttatcagagaatgataaagacaattttaacaattttcactgcaggcacgtctaggcaagccccctgtgcacaatgaccttcgtgggttggacattctatggggactctcccctgtctgcctaggagagttatctgcctcctccctctatcattttcctctttgaataagcgcatctaactgccgttagaatacagacaaaggccaaccttaactgctcccagctgacaggggatgctgttttgggaagatctcccttgaggtctgtctaagggacctagtaaaagggagccattatcccaggcttcacttggatgaccatttggagttgatgcctgaaggtgagaagagacaaaccaggttattagaagacatgtatcaaaaccaaacaaggtggtaaggacagtttgaaaaaaaattccaaggctgctgacacacccagataactggcggctgtagttatgcctgctaagatttgggtgcatggggcttggctttcgttagctccctaggacttattttcccaaacaaagaaacctccgggttagggggaccctatttattccagtcacctggcatgatttgcaggataattgctcagaattaaaatattcgtccagatgtttatatagcccatgcctgtgtttcttctgagctgcagccagagatcattggttcgttcacagcgataagcagagttagtctaaaatggaggcaaatacttaaaacaattgaagagactgtaatttaaagacaaatgtatgatatgttttgaaacataatttttctctctccagttctgatttttgtcagaaactaatcattataggactgagtgatttgcaaaataaactttagtcttgtggttggtctgatcatttgcataaagtggagcaataataattaataataattctgtaggaaaagcctgcaagcaccaggagcttcacagtctaacagtatgagcacatgcatcctccagcaactcactgaatattttcaagtcagctggttcttagcttaaataacatccagttggtatctgtcccaggaacactaatatatggttctctctgcaggcccctctcgccacagatttaaggtttatttttttcctctgtgatatcaactcagatatgttgaaggtttttcccacatttgtggtttttcaggtttgttgttaataaggtcagaataagatcatagtttactcatttttttacattcccatgctgagtagctacttttctctataaaatccattagctgagagaaaaaataacattttcctaacggtgaacaattaaatagtttgacatatatttgtgtaccagtatataatgcagcttcgaatcaaggtgtgcctcaatcataaaaaacatggctaaattctcaaagaattgtgctgagtgaaagaagctaaggaattaagagtaaattttatataattcattgtagaaatattagaagatgccactaccataaattaaaatgaagaagacttaaatttttctgagaaaatggtgttgggaatgatgcggatgtgatttaagtttcagaggaataaggaaaaagatttagggattaatttaattattcaaaagttgattgaagtgccgagtgaatggctgcaaacatagctctacatttttcaaatcattccctataaatctgaattaattatttatttattatacttgaataaagcaataacgaagaaataaatgaatatttttgctaaaatggagcaataaaaagactgatattgacagaagaaatatgactgacttctgaaaacacacatgaaccatggttctctctgcatatttaggtgaattacagaaagttgtcataacagatggggaatcctgcagacttcactaggcatggtccacgctgccctggagttgtctcaggggagctgcctcctccggtgattagagcacaggcccagataataggattacatttttttagatgtgtaaacttagacgcactgcacagctgctgtattctctatgtaaattatcttctgtaaaatacaacattaaaggctgcattaaatatattgtgtaaatatgtaaaaataaaatcagattatgagagctaaatgttaatcaaggcacaatcacataatataaaattatattttcctgaatgatggaattactaccaatctcccccaggagacttcatctgcactgggcccggcctctcctcagatgtcccatcacagagcttgctatataatgggggacatgcaaatagggccctccctctgctgatgaaaaccagcccagccctgaccctgcagctctgggagaggagcccagcactgggattccgaggtgtttccattcagtgatctgcactgaacacagaggactcgccatggagtttgggctgagctgggttttccttgttgctattttaaaaggtgattcatggagaactagagatattgagtgtgagtgaacacgagtgagagaaacagtggatatgtgtggcagtttctaaccaatgtctctgtgtttgcaggtgtccagtgtgaggtgcagctggtggagtctggaggaggcttgatccagcctggggggtccctgagactctcctgtgcagcctctgggttcaccgtcagtagcaactacatgagctgggtccgccaggctccagggaaggggctggagtgggtctcagttatttatagctgtggtagcacatactacgcagactccgtgaagggccgattcaccatctccagagacaattccaagaacacgctgtatcttcaaatgaacagcctgagagctgaggacacggctgtgtattactgtgcgagagacacagtgaggggaggccattgtgcgcccagacacaaacctccctgcaggaacgctgggggaatcagcggcagggggcgctcaggagccactgatcagagtcagccccggaggcaggtgcaggtggaggctgtttcctgtcaggatgtgggacttcatcttcttccaacagtttctctaatgaacctctctaattttagaattctgtggttcctaatgtcatctctacatattttcaaaagatcattttaacatgaggacataacctctcatgcaccaaatgcacattgatgcttacaaagatgaaaagttctcaaccattgtgaccaggatcgcagtcctgaggaagctcacgggtgtctgatgagtctcctccattcaggcccaggacagaaacctcagagggattcctggaccagaacggcagggattctgatcacagccaatagagaggctgggccagggtcagtgtcctgtagaagctcacagggttcaagtctgacccttctcctgaccctaaagccaatgagcatcagcactgatctggtgctgcttttgctcccaatacatgttctttctttggagtgtttgttctcccttttttatttgcttttctttcttcctgaaaaagaaacacatggtctctgtgatctacactccagggctcaaggcattttcttagaactcaggcaaggctcaggcttggctactccagccacgtgggagaggctgacgggatttccttctctctccatattctcagggccctcctctgtgttgtgtgtagactcatctgggaatgcaattggctgttagtagtgaaggggatgaactcatttgatcaaaatgggatgtggatgtggaattaaccctgttctatgcacactgtcagagtcatcttcttcagaagtagtgttagaaagagcttgtgaaatttatcggcaacaaaatggatccccttgtgttaaaaccctaatgaatgaagctggggaaggccatgaaggagggttctaacacatattcctgataagatgaactgtcataaatagactctgcacagccacaaccttttacacggagaccaccacagccttaaaagctttatttctccaagtaaatctgccctgcaactgcctgttcaaccttacaccgctgtctcaaaatagctgctgtcaccctcctcatttttccttaattctcttttttattattttttaaattatactttaagttctagggtacatgtgctcaaagtgcaggtttgttacatatgtatacatgtgccatgttggtttgctgcccccattaactcatcatttacattaggtatttctcctaatgctatccctcccccttcccgccaccccatgacaggccccggtgtgtgatgtttcccaccctgtgtccacatgttctccttaattttttatcttccttttcctacctgaatgtacccatacatattttaattgaaatgcacatcctggaaaaaatattattatactttagagtctctttctgtctgttattcaggttgacaagctgcagacggacatgccacatttctgtgagacatagaggatgacagtttttggagatgtctaggaatctccaatgtccataagatcagccatcaataaatgcagactggaggtcccagagagaagtgaagctgctgaatcgccgtggaatttcattttctccagttctgctctgatggaatcaggcccaccaattttatcaatgacaatctacctaacttagagtcaattgataacagtattaatatcatctattaagtaaattcataactatatatatagtaagagagggagagagagagacagagtctcgctctgttacccagggtggagtgcaatgtcatgatcttggctcactgcaacctctgtctccggagttcaagcagttctcctgtctcagcctcctcccagtatctggaaatacaggcacacaccaccatatccggctaatttttgtatttttagtagagacagtgtttcaccacattggtcaggctggtctcaaactactgacctcaggtgatccacccgcctcagcctcccaaagtgctgggattacaggtgcaggccaccaagtccggctaatttttgtatttttagtagagatggggtttcacaatattggtctggctggtctcaaactcatgatctcagcctcccaaagtgctgggattacagatgtgagctactgtgcccggccaacatcacctatattaatgttggattgaataactacaaagtctaccctaaccaagtgtaccatcaaacttaccattacccagagggaagaatctttaacatgagatcgatttcttaagtgttttaaggtgcaaaactgaccactgtacaatcacccaattatgattttgctaatgagttgtagaagttgcatgtacattttggatattaacactttttcagatgcacagcttataattatattctctctttctgtgggttggaaattttttccatgctttgcagcatctttttgctgtgatgtagttctgcttgttcaattctgcttttattgtctgtgcctttaatttgaaatataggaaatcattcttaatattattttctgggtgggggaaattttacaattgcaagccatacgtttaagtatttcgcccatttagagtaaattttggtatttaatctaaactaaaattcttaattctttgcatgtgtagattcagtttttctaacaccctcttagggagagactttgattcatccattgtatattgttagttctcatgctgaaaatcagtttgctgtagatatattagtttatttctgagctctctctatatattaatgccaataccatcctgttattatttatggatcaaaatgtgcatatttgtgaatttcaaaatgttgttcagaacttgtgcatgccaacaactgtgtttctcctgcactcttgggctagtgaagctctcacagaccctctctctcacctgtgctgtctctgcattctccatcacaaccagtgcttcctgctggagctgcatccatcaccccccgcaaggaagggactggagcgaatcaggtgcacaggtcatgagggagtgcacattccaacccactcctcaagagtccagtcactatctccagatccacatccaaaaaacagtgtttcctgtagctgagctacctgagcaacaagtacacaaccatgaattttaatacaaaagacacaacgaggggaagtcattgtgagcccagatacaaacctccctgcaggggagctcagaaagagcaggaggcactcaggacaccagggaacactctggacacatcaaggcaggtgcaatggggggacaaggggctggagatggggtttggcatcaccatcgtatttcaccactggacacccaccaccgtgtttattctcatgtacctgattctgtgtattattagaaaatggcatttatataaatatatagccatatgtaggtgcatcaagttgtcctctccatcgtatgtggacctttccactaagactctgagtccctgtatttatatgagcacctcataaattatggtcaattttgtgggatctctatcttttctttctcccttcttccctccttctctctcactcacaaactcacacacacgcaaaattctacaacttcagttacgtgatgtgttgaagacagtttataatgtgcagcttttccagtttagctgatgttcatattgctgtgagaataggaacattgtgtttctcagctgtgtatttctctaaggtagcagcaacttttttttttaatttgacattttttaaaaattttattattattatactttaagttttagggtacatgtgcacaaagtgcaggtttgttacatatatatacatgtgccatgttggtgtgctgcacccattaactcgtcatttagcattaggtatatctcctaatgcatttttttaaatacccagatactgaaagcaatccaaatatcaatcagcagcttaatcataaacaaattgtggtaaattcattccctggaaaatcacccactgttacattctggtaccgctggatacgttcaacagcaaaggtaaagtcacaagtacatatgatgagtcaaataagacaaataaatacaagtacacacatacaattcctcttttataaattctataaaattaataccaatctaaagttacataaagaaaaccagtagttgactctgggtgtggtgtgagaaggaaaggtgtaggaacaagaaattacaggaaaacaagaggaaattttgagggcacttgagttttttctgtgttgagaaaggtaatggttatgtcactatttgtcaaattgtgcacattatgggatggctattatttgctaatttcacctcattaaaatatgccaaatttaaacacatataatttggtagaaaataagttagacagagatgaataaaatatatgagaaataaaaaaagaaaatcacagaacgttggcataaggacttcactcatcaaactgaagaaattttaaatttctcaacacagaattaaagatttaattaaagatatatgagaaatcaaagactcctggatatatacatgaataaaccctaagcctacctatatttttagggaaacactagaatacaacaaaataatgtcatgaattcattacataatgggcgttaatcaaaccccaccaggcatgtccagctgtgtcctggggttgattcagggaacaggtgtgtcctgtggttaggagaagtggcaacaagctcacagcatctgttctagttgacaccataaaaaggccaagagatcacaaccaaaatgtagtgtggatgtcacatctgtgagtgccgcacactcccccatgtgaatacgaaaaggttgattacctcttgaggtgtctgctgagagtagagctggtctctcaggaatgtccaaaatggctcgatagagcaagaaaggagactggctcaggttgctataccagtttggtggtggaggcagagtgagggttctcactcacagaaatgggtttgtggggtttgaacctccaaatggcatcaaatgagggagttcttgtgattcctaactagatccacctcgtgtcggaaagaaaggagatgatggaggaatgagccttaagttatcagcagtcagacatcaaaacaagtctgatgacttattctatgtagcaactataaataaatgaataaaaatagatcataatgaattattcataataaatgaataaaaatatgaataaaaatagatcagtgtccaatatgggtggacaaaaaccagtctacacaaaacaagaagactgcttataagaataagcaaatcataatgaaaaggaggaaaatgaggtgaaaggcacggggcaggggattacacaagggtcctgttccaatgtcttgtgtggagacttttcattacctaaaatcatccgcttgttctgaatgtcttaggtgagctgtctgctccaaaacatcagaagcgccagaggattcatgaggatattcagtttaatatcttctatttaaggtgccttacaatagtgtaaaattcttaattattattattataataagagatagggtctcactgtgtcacacaggttggagtgcagtggcacaaccatagctcactgtaaccttgaacctctggctcacacaatccttctttataagcctcctgagtagtgaggacatgagaccaagctgatttttttttaattctttcatagaagtggggtctctctatgttatccaggctggtcttgactactagtcttatgtgattcccctggttttgcttctcaaagtggtagaattatagacatgagccacgatattcggtctgaactgattctttagttgcaaaatatcaacccaagaattgactcccttaatttttttctgcagtgttttggttaatattgcctgataaaatttattctaatttgtttcaacagcagaattcttcctgacgttttttccaatatatgtattttcatggttgaagatcacaaaatactgttaaaacatgacataaaaaggcaaccttaaacttttggtgattggagttagtataatacaaaaattacgtccaatattgtgtaacacacacatgcaaaaagacgaaggtgagcaatgagggtaaactttctaaatgtatgaatcttccagctcccaagtcataggatagtaactgatgtggcctgagggaggtaccagagtgacacagtgctagtggcataactcttggccaagagactttcaatattttattaaagtttttatatttttttaatttaatgatgccatttttttcaacatattcagaatattgtgagtgggattgattctggatgatatgaacaatgggaatgccttctatgtttagataatattaaggaccaggttgagattgaaagtttgtagaaatgatgcaccataacattattctagtttccatactaggttttttctctttgcttgcatttcatttcaaatttatatgtcagatatctagaatgtaataatttatttaaaaatttcttttcttgtagtccattttgatggggcttccagaagatttgaaaacctcttctgcctgcaggacattttaaaattctgcactacagtaaaacatctgtatttaatcatggtcttcggtttattgacaagctctagtaagtgcaataacttctgccttctcggctgattttacatcagatagaggaatttatcttaaatgaaagtttgtactagcaatataaattatgagttaataaccaccacctttattatttaggtgttattcatcaagaaataatgttaaatcaaggctctcaacgggaatattatctaagggatgcacaaaatgttttgctaatctagataaaatagatgtgaacacactcttagtatccagtcatgtctcctgtctgtcacattattaaccacacggtaactttgacttcacttcggactcgttctaattttcaaattcgttacatattaagcttaatgtctctagactattctagcagagtgaagaaagacaagctagactgacaaacaacctaggatgacaaacttcttgtcactctctataagaacttgcttctccctgaacttcagacttgtcgcgtgttttgaaacattaattatcaaaagtattaaagaaaatttgcaaagctacatcttctatgtttatgttattgttgatgcaattgtaaaaaataaggaaaatgtattccttttctatgtgcgtttccaaacttaatagcagatttttagtaagacccagaataataaaaaattcaaatattgttcagctgcttaacagaaaaacaaattatggtaaatttgtttgctagaatgctatccagtatttagaataaataaatgtctgctatacccaactataaggtaaaatatcgaattacatatgttaagtaaaataagccaaacaaataagaatatatactgcattgatttgtataaattttaataaactaaatgactcagccgcaatgtatagctcaggagttgccagagaaatggtagaagaatgaaagggaaaaggaggaagaatgtagaagaacaaaaggaaatgttgagaattctcttgtccaccttgataacaatgatggttacattatatttatcaattgtacaatttaaatatgtgaaagtttattatctgtaaactaaaactctcaaaatttattacaagcaaacaaatggaaacttagacaaagaaggagtgatagaaagatagaaaaaatgtatattaaatttcagaaatacctaagaacttatctgcctgaaccctagttctcaccatatttttaggtgaatgctagaatgcagcaaaatcacacgtgttctcactacagaaagtgggttccacaaccacactaggcacgcccagctctgtcctggagttggctcagggagtaattggggccagtgatgaggagcacaggctcaggtactggggcttactcatccagacgtgagctcttagacacatacttagccctttctccatgcgtggttgacttccacatctgtacatggagaaacaattgactccgacaaaacataatttgcacaaatatgtaaaaataaaataggatgatgaattcaaaaagtttatcacagcataattttataataagacagcatattttctgagtaccatcgttgtcaccaaattcttgcagggcacagtcattttatctgggtactgccttctcgtcaggcttcccaccccagagcttgctatatagtaggagacatgcaaatagggccatctctctgctgaagaaaaccagcccagccctgactctgcagctctgggagaggggccccagccctgggatgcccaggtgtttccacttggtgatcagcactgaacaccgactaccaaccatatgaagtctgggctgagccggtttttccttgttgctattttaaaagataattaatggtgaactagagatacttagtgtgaggggacatgagtgagagaaacagtggatagtgtggcagtttctgatcacgatgtctctggaggtgtccagtgtgaggtgcagctggtggagtctgggggaggcttggtacagcctggggggtccctgagactctcctgtgcagcctctggattcaccttctgttaactactgcatgcagtggatctgccgggctccaggaaaggggctggagtgggtaggtttcactaaaaacaaaactaatcgtggaacaacagaatacgccgcgtctgtgaaaggcagattcaccatctcaagcgatgattccaaaagcatcgcctatctgcaaatgaacagcctgaaaaccgaggacacggccgtgtattactataccagagacacagtgaggggaggtcagtgtgagcccagacacaaacctccctgcaggggcgcgcggggccaccgggggcggtcaaaacccactgaggacaggacaggtcccaggagcagatgctggggtagttttcctttctcatcagctggagaagtcaggtttgtatttgcaggactctgcagcattctaggctgtgacattttatcacttgtatttattatgactttattatcgttagtatttaaattttagtaattattaaaattatatataagtacattttaaatatgtactttgaagatataaatattcctaattatttgcactgattcttccagagttttattaacatttgttgacatcagcaactacatagctatagggacataaatttataaacatagaaatatgtatcggcaagacatggtggtctgtgcctgtaaccccagcttgggaagctgaggcagaagtactgcttgaacccagaaggcggaggttgcaatgagccgtgatcgcgccactgcactccagccgggcaactgagactccatctcaaaaaactaaataaataaaaagaaagaaagaaaaaaagatgtacaaatacacagacctatgcatatatgtgtaggcattcatattaaacattaagataaaataattctaaaaacatgtcctgaagaatcaaaattaatgatgaactaaatataaattattagagtaattcataattgattttggttatttttaattgtttacatgttgtgattttacacaaaatattagtcatttatcctgataaaacaggtcaaaatgttatatcaagagtttatttactttgtattactaataatataaaatgttccacatatttttagccatgttttacttatctgtgaaatgtgtttattaatttttcattttaatatgtcacctttatctttctaatttcctggatttaattccactacagctgaatgcattttaataattattgtaatcacatttacattttttatttgaattttcatatatattttattaggattttaatatcaatataaatattttcctaccattgtctattttctatttttatgatataaaattaacataaaaatgcttagattttcaatgtacagcttgagggcttctgacaaatgtgcgcacaaataagaattatttgcttactttttagtgtatactgaggagtgggattgctgggtaaaatgatatctctgttttaagttctttaagaaatctccagtctgctttccaaaggggcaagattaacttatattcttctcatcagggtataagtgttctcttttctccagagtcccaccagcattcattgttttttgactttttcgtgatagccattctgagtggtgtgttgctgcacacctacaatcatctcatatttgataaggctgatgaaaacaagcaataaggaagggactccctgttcaataaatggtgctgggacaactggctagccatgtgatgaagattgaagctggacgtctactttcaacatacataaaattaactcaaaattgatgaaagacttaaatgtaagacctcaaaccataaaaatccttgaagacaacctaggaaatactcttctcgaccccaactttgacgaataatttttggctgagtatccaaaagcaaattcaaccaaaacacaaatagatgagtgggacctaattaactaaggagtttctgcacagcaaacccgccaggagatagatgctcaggacaccagagagaactcagttaaaccagggggcgctcagaacagcagagtgtgctcaggacaccagggggcgctcagaaccaccagcaggagctcagaacagcagagtgtgctcaggacaccagggggcgctcagaaccaccagcaggagctcagaacagcagagtgtgctcaggacaccagggggcgctcagaaccaccagcgggcgctcagaacagcagagtgtgctcaggacaccagggggcgctcagaaccaccagtgggcgctcagaacagcagagtgtgctcaggacaccagggggcgctcagaaccaccagcgggcgctcagaacagcagagtgtgctcaggacaccagggggcgctcagaaccaccagcgggcgctcagaaccaccagggggcgctcaggacggcaggggtcgctcagacaccacggttcccttaggaggcagctccacattaggtccctgggcagggtggggtttcctttttgaacttgctattttttgaccttgtaaagcaaaggtcttccccaggatctcttagtatttcttccttgtaactcatgtcttgtcttgttttgtttttgtttttgttttttgtttttggtcatctacaaaaacttaaacttagaacagttgattcagaaaggcaggaaagcaggcattcctctaagtctcccctgagacaaatacatatatgatttcttcctccccactataatttatgtaaaaatgaagattcactgagtcagactaaattgtgtattcagtggaaggataataaatgacacaaaagaatgcaacctattgtctcttatcttcttctaacctgcaagcccccattttcatttgtcctggcttacaggaaaaaaaaatgtacatttcacatgtattgactgatgtctcatgtctctgtaaaatgtataaaagcaagctgtacttcaatcaccttgtgcacatgtctcaggacttcctgaggctggttatggttgggttcttaactttggcaaaacaaatgtattagtctgttctcctgctgctgataaaaacataatcaagactgggtaacgtataaaggaaagagttttaattgactcacatttccacgtggctggggacacttcgcaatcatgtcagaaaaggaagggacatcttacatggtggaagactagagagagcttgtgcagatgaattcccctttagaaaaccatcagatctaatgaaacttattcactatcatgagttcatcatgggaaagacctgcccctatgattcaattacttctcactgggttcttccaatgacacatgggaaatgtgggactacaattcaaaatgagttttggatggggacacagacaaaccatattaataaacttcctaaattgactgagacctgtctcagatatttgttgtttatcctactcatgtacagccttcagagttccaaagcctatatcagttttccaggattgtttcccctttttgttggttatttcctcctttattttctatgtttagttccctttttctcccactattttttcatcattgggatgtgagacttcacaacatttgaaaggtaggtaacaatgagctatcttaacaacatgggacctgtttatctaagagtaatccattctatcaatgaaagataaaacaaaacaggagaccagaaactcatttggttgtaaaatgcttcctctgaatgattttgaaaaggaacaggtggggaaaatataaaaggaaaataaaaacttgtgctgtcaattcattatgtcatgaggggggaaaatcctaaaggatgatccatgcaagaaactgattttcctttcattcctaagagaatagctacaaataaaaagttaaatatcttcacagatagctactctttgttcattttactttatataaagtgctaacttagttcaggagaactacataatttttctgtttccctatgtgcttctctctcattacaacatgtaaattttcatactgtccctctttcccctctatccagctttccccccttttttgtattgaaagccctgaaaatcatctttggggaacggcactgaccacaaatttttctgtgattacttgtattttcattccaggcatgccctaactttggcaaaattaattttaatttgattgagatctgtctcggaaacctttggtttacactaggaaagatcccaaattacgagtcaattactataaagctcagccttcccactgtgtatgtgtgtgtgcatgtgtgtgtgtgtgtgtgtacacgtgtgttttaatttttgtgggctttgagccatgtagttctctctgtggacatactatttggcgtgatctttgaatagagaattctgaaagaaataagaggctcctatgagttctctgaaagtttctggactcaccatggatcttgactgtgtcattgcatctgacagtcccagggaacagactctctggtggtttcaaagaatctgtgcttgggctccccctgcagtttactgggtacagtaatgttaaatcactgtttcgagagacaatttcgaaagcattagatgctgctgagagaggattgtgaaccaggggacagccccttcattctgggggagcgacattgggagaatatgctctgtgagcccaaacagcatcctcccctgccgggtgagggcagagctgcaggacaggcccagaaaccactcaacacagatgtcagccctggagcagctgcagaggagtctgaggagaaaattttaccagcatctgaattacacttatttcaaaacaaaaatgcaattaaaaagttaaaataagtaattaatgtccaggcacagtggcttacacctataatcccagaaatttgggaggctgaggtgggaagatttccaggagtttgagatcagtctgtgaaacatagtgaggcttcatctttacttttgaaaataaaataaaataaaacataaataatttagcaaaaactaccgatgtgtcttccatatcccatcgtacttagagcattgatgtaacccaatgagtcaatgagaaccaaatttgaaaggagaaaattttagagttttcagatatcttaagagttggaagatgtagaacaaaactaattttatcaattcaatgtgtgcaaacatggagagacacactcatgccagtagttcaacttgcaaagggcaaaaaccaaaaaagtttgaagttgctagtgatccatttgtaggtgagatcattttgaggatcatgtcctgtgagaggctgtttctctattagaggagttctgtgctcatgaagtgctggacatgctaggggacaaatatcagtaaacaaacatcagaacttgaatgtcagcttccccctgctgcattctccgtgtgtcatctctctgttatttctcatgctagatcaggtctttagctatgaaatattccacctaatttacatgtcaatagcttgaagtctactgagtttaattcatattttttctatatgttacagttacagtttgtccacaaggacaaggtttgtccacaagtttgtccacaaggttacagtttgtccacaaggactcaatcatagaagtgcagagtccttttcgggccacatttaattcactttatcagtgcccttcagtatgtggttcctgagaatttcacatgacaacacatttaccacactggaatttaagcaatccaacacatgtttgtagctttatcttgtaataggctgtatttcatatggcagcctctgcttcagtttagctaacactatggctttgtttctctctacaagaacttgtttctcccaagatttccatgtttgtgaaaggaaaagaaatctctgggacccccaaatcactaagccaaagggaaaagtcaagctgaaaactgcttggggcaaacccacctccattctttccctaaaatgatagctactaactgtcaggcctctgagcccaagataagccatcatatcccctgtgacctgcacatacacatccagatggccggttcctgccttaatggatgacattccaccacaaaagaagtgaaaatggcctattcctgccttaactgatgatactatcttgtgaaattccttctcctggctcatcctggctcaaaagctcccctactgagcaccttgtgaccccctctcctgcccgccagagaacaacccccctttttcctttacctacccaaatcctataaaacggccccacccctatctcccttcgctgactctcttttcagactcagcccgcctgcccccaggtgaaataaacagctttattgctcacacaaagcctgtttggtggtctcttcacatggacacgagtgaaactaaggttttaaaaaactacatacctccttcaaaatttgaccacaaggaaaaaccttgtggaccaacaacagacagagtcatttctctgctcacataagtcaaatgcctatctgattgccaccatttctctattgttttgctaagccagactaaggcctacgtgactattcctgtaaattgtgcattcagttaaaggctaatcagaaactcaagagaatgcaagcatttgtctcaaacctacctgtgatctggacgctctctccccacttcagaaagtcctgcctttctgaaccaaaccaatgtacatcttacatatattgattactgtcccatgtctccctaaattgcataaaatcaagctgtgtcccaccaccttgggcatatatcgtcaggactccctgaggcggtgtcactgccatgtccttaatcttggaatacgaacttcctaaatctattgagattagtctcaggtactctttggattacaggtttgttttttatttcataacttcaattatctgaaatactaaacaaaatttgccaaattgtacattctcttgttactgttgttgcaaaaaatatatttatgtaacttatatataatttatcatctatgtgtgttaccaagctgagtagcagatttattagtaagacttagagagagtaatgaaaaattcaaatgccagttagtaacttaatagaaaaacaaattatgctacatttgtttgctgaaatgctacccattatttgtaagaaataaacacatgcaacataaaagatttaattctcagtatttctattgagaaaaataatccaaatacataagagcatatactatattttttcattcttataaattctagaatataaaagctagtcaaaagacatgtgaaaacatcagtagatttataaagaaatggtagaagaagggaaggagaaaaaccaaaaaaatataaaagagcaagaggaatgctgaggggagttgacttgtcaccttcttaaaaatagagattttatttttcaaagtttactattgtacagaataaatatgtgaattttcttatctgtcaattaaacctcataaaatttattacaaaaaaactgaaattttagacaaaaagagggtgataggaaggaacaaataaatatgttaaatgtcaaatatacctaaaaatttatttgtctgacccctagttttctccgtatttttaggtaaatgcagcaaaatcacacaggttgtcgtggcaggaagtggattctgcaaaccacactaggcccgtttatctctgtcctagagttggttaaaagagcaactgaggccagctgtgaggagcataggcccgggtactaggactcactcatgccagatataagcccttagacacatacatagcccctccatgtgtgggttcacttttacatctgtacatgaagaaaccactgattcctaaataacataatttatacacataggtaaaaataattaaaaatgtgatagttattaagtgtttatcacacaacaatttcacaataaaacagcattttcccaaatgtaatcattgtcatcgaaatccccaaggacactctcatctgccctgggccctgccctctcctcaggcatctcaccccagagcttgctatatagtaggagacatgcaaataggtccctccctctcctgatgaaaaccagcccagccctgactccgcagctctgggagaggagcccccgccctgggattcccaggtgttttcatttggtgatcagcactgaacacagaagagtcatgatggagtttgggctgagctgggttttccttgttgctatttttaaaggtgattcatgaggaaatagagatattgagtgtgagtggacatgagtgagagaaacagtggatttgtgtggcagtttctgaccttggtgtctctgtgtttgcaggtgtccagtgtgaggtgcagctggtggagtctggggaaggcttggtccagcctggggggtccctgagactctcctgtgcagcctctggattcaccttcagtagctatgctatgcactgggtccgccaggctccagggaagggactggaatatgtttcagctattagtagtaatgggggtagcacatattatgcagactctgtgaagggcagattcaccatctccagagacaattccaagaacacgctgtatcttcaaatgggcagcctgagagctgaggacatggctgtgtattactgtgcgagagacacagtgaggagaagttaatgtgggaccatgcagaaacctccctgcgggaacgctggggaaagtcatctgcagggggcgctcaggagccactgatcagagtcagccccagcggcaggtgcagatgaaggctgatttcctgtcacgatgtgggacttcatcttcttaaagtttctctactgaacctaagttcggaattctgtgattactagggtcatttctacatatttttaaaatgattgttttaatatgaaaacctattctcctatgcagaaaatgcagattgatcctcacagaggagatgaaaagttctcaaccatggtcaccactgtcagagtcctgaggaagctcagggcttcctggtgagtcttctccagtcagactgaggacaggaactccagaaagaatcctgactagaactgaggtattgctcctcacaagagaactcaagctgcggggggtctgttcctgcagacccctgacccggtggcggatgaataaaacgtacactgacacacagatattctgttttgccagttcagctgagggtccgaggcaacttacagactccaagaagaatcctgtaaagaacggcagcagtggccctgagcagctcgcactccaggcgtgtattgagtatagaattaacaacagaagctctgacaacacacttgtggataattaacatggttaagagagtagttctacgaatgattaaagctcagggactgcggtctaaagtaaataccattagggggcaataccctggttagttaatggaggtagggtaaccagacttaactggggaggcctctattgtccctagtatttaccctatgcctaacgctctaaggtaagaactggccgccttcagcctgttcaattattacaagctatgtaacctttcggccttctaaaaaggtatatgactattccctataactttccttaatattcccctttaatatttccgccaccatcctgagtgaatcccagcaagaacagtctttggggattctgattacagaaaaaagagaggctgggccagggtcagtgtcatgtagaacctcacaggtttctcgtaggacccttctcctgacactgaagaatgcaaatcagaatcaatactgatctggagcttcttttcctaattcatttactgtcttttttagatgttgttctcatttttccatttgcttttcctgctttccgaaaaaggaagatgtttttgctgtggtcaaaattccagacctcaagcccttttcttggcgctcaggtgggtctcaggctgtggctgctgcagtcacgcaggagagtctggtgggactttcttcactcttcgtcactcaggaccctccactgtgttgcatggagactcatctggaaatgcaagttgccagtgggaactgaagggacaagcttgtctggttaatgtgggatgtggatgtgtttctaatcctgttctgaaaaaccgtcacacagtaacgttcttcactagtggagaaggaagtgggtgtgaacgttgtcagaataaaaatggagccacgtgtgttataatctttacaggcgaagctggaagaggtcatgaatagagggttctcatgcacacatccctgataacaagaattaccctaaaaatactctgcacaaccacaatcttgaacaaaggctaccacaacaataagagaattaatactgaggggatatctgccctgcaactccctgttcagccttaaactgattctacccttgttattgattcttctaccccaggataattgtctcaaaatagctcaggtaatcttctcatttatccttcagacacttgtctttctttaccaacctaaatgtgaccatggataatcccattgcaatgctcattttcaaataaatacgatttgattttggagaatctctttctctctgatgtttaggtttgacaagctgcagagggacacaccactttcctgtgagatgtaggggatgacagttttgggggatggctggaaacgtgcagtatccttagggtcagccatcagtaaatgcaggctggaaatcttagaaagatctcaagctgcttaatcaccacggagttttaccttctccagatctgttctgatggaatcagggccaagtttgttattgatgataatctacctaatattgagtcaactgatcacagttttaataacatctatttaaaaattcacacctggattagtgtttgatcaaataactacaaagtattgcccaaccaagcataccatcaggcagactgttacccacagagaaaaacattgaacatgagtttgaggttctcacattgttaaaggtgtaaaaccgattatgtttaaattatgctatttttattattgttattgagttgtagatgtttcatttacattttggatattaacgctttttcagattcatggcatattatccaattctgtgagttggaattattttgttactttgcggaatctttttttaaatctagtcccacttgtccaattctgtgtttttttatttgtttgaatgtaaaatccagaaaaagattgctaattttttgagggttgggagttttacaattgcacgtgtttcatttaagtatttaatgcatttagaattaatttttttgtttattctaacctaaaattcttaattctttgcatgtaaatatccaattttcataacacgctctttggaagacactataatttagcaattatatattgatggttctcacgctgaaagtcagctggccatcaatatgtgggtttatatctaagctctctgtatgaatttatgcgaatgccattctgatttattactgtatgtttctaataaatgttgaggcctggaagtgtaatacctcaagctttattcttgccttgttacagatattagaccaaaatattctaaaattttactattgagtataataatagctgtggcttttcttaattggtttcattatgtacaagttgttttcttgtcttcctactttgttcagagtttttataatgaaatcctgaatttttttcaagtgttttctgtgtctgatgaaatgttactgagatattttttctttagttttttaattaatcaactgaattgattgatttgagaatgtcaaatcatctgtgcatctcagaataaatttgagttgatcatggtgtatggtcttctataaaatctttagaatttattttactattgttggggggttaatttatgtctactaatgatattggtctatgattttcttttattgtggtgcctttgtctattactggtagtactctaacggtagcctcatagaaagagtttggaaggtgtgttgcagactacctttaaaatagattttatcagtggagaaacggtgatagtttttttcttcagttttctgttgggaagagttttgtttgtttgtttgttttttgtttttttgttttgttttgtttgttttttgagacagaatctcgctctgttgcccaggctggagtgcagtggcagaatctcggctcactgcaagctccgcctcctgggttcatgccattctcctgcctcagcccccaagtagctgggactacaggcgcctgccaccacgcctggctaactttttgtatttttagtagagatggggtttcaccgtgttagccagaatggtctcgatctcctgacctcgtgatccgcccgcctcggcctcccaagggaagagttttatgttgtttaaaagatattctgaataacttaacctgcttaatgggcttacataatattcctttcttccattctttttaaagaactgcttacctttcctaattatttttagggtgatttttttcataaagattgtgcaatacattttgaggtgagacttagtggattttttctaatgaattagaaataataaatcacttaattgactattgtattaaggttgatttgttgaatatttgctaaaggccagttctttaagctgtgccatgtactaaatccctaaccgactattttattcaggttggtttgttgaatatttgttagagaccagttctttacactatggcatgtaataaattccaaatggcagtacgtcattgtttacttagcttttgtgcttatatttttcagaggaaaaaaaatactgtaaattgtaaatacccaatacctaacagtattgtatgcaaatctgtgactgttggcagtgtcatctctgagaaacagataaagtttatttactatatataaaaaaagagtttggaaggtggactcctcaccaatttttgaaagagttagagaagcattagcattaattctttaaatgttaagactaattttatgatgtaacatataacctatcatggagaatgttcaatgggtgcttgagaaggatgtgtattacatggctcttggttggaaggttctgtaaatgtctttcaggtaaatttgttcaatactgttgttcaagttcagaggcttattaagaattttctttctggatttgctatacattattctaagtgaggtattaaggttttcccttatttttatatagttttctatttctctctatatatatatcttaaagtttgcttaatgcatttatatttgtatttgtactgtgtaaaaagtaaaataaaataataattgcttagtgagtttcatggcacaatcacgttatgaataatcatattttcccaaatgctgtcattgccactaactcctccagatacatggtatattatccaattctgtgagttggaattatttcgttgctttgcagaatctttttttgttaatctagttccacttgttcaattatgctcctccgggagtctcacatctgctctgggcactgccttcttctcaggcatcccacactggagcttgctatagaggaggaggcatgaaaacagggccctccctctactggtgaaaacaagcccagacctggccctgcagctctgggagaagagccacagcactgggattcccaggggtttccatgtggtaatcagggctgaacacagagctcactatggggtttgagctaaccagaatttttcttgttgctattttaaaaggtgactcatagagaaatagagtgagtgagagtgagtggatataagtgagaaaaacagtagatgtgtttggcagtttctgaccaggacgtttgtgtattttcaggtgttcagtgtgaggtggagctgatagagtccatagagggcctgagacaacttgggaagttcctgagactctcctgtgtagcctctggattcaccttcagtagctactgaatgagctgggtcaatgagactctagggaaggggctggagggagtaatagatgtaaaatatgatggaagtcagatataccatgcagactctgtgaagggcagattcaccatctccaaagacaatgctaagaactcaccgtatctgcaaacgaacagtctgagagctgaggacatgaccatgcatggctgtacataaggttccaagtgaggaaacatcggtgtgagtccagacacaaaatttcctgcagaaagaagaaaggattctgggccgaaggggacactcagcactcacaaaacaggtggagccccagggcaggtacagaaaagcagtcaagggctgctgtccttcaggatctgtgctttcctctgcatgtagcagttcccctcgaatcctctgcacttttatgtttctgtgcccaccatgaggtccctggattacaaaactttaatttaaaagaggaaacattcttatatgtcccaaaaacaaaagtaagtattagaggcacaaaagtgcacaggcggccaggtgaggctgtagacactgccaccccgcaatgccagtctcacaactagcactggagagtagtgggcattcagtggagcttcctacctatcctgtggtccgagctaagtccagcaaggccattggtgccttccagagcacagtagtccatcaggaatctcccatgtgtcccagcagcagccttgcctcagtatctccactgtgcacagccattgtctgggaggagctcccaggatgagtgtctttggcacacaccaggtggcgggtgttagagtgcagtacagcagctggctgcctggtctattgggctccctgatgttggagggatttgaggtgcattctcaggcccagcaccctctttgtgaatttttatataaaaaccctgattttacttcattttctcagatgacatagataactaaaaacagaatctgcaaagaaattgtaattttcaactttaccccaaattcattgtttcttaattctgtgcaagatccaaacatatttttgccttccacatgagaaattgttctgtttaaactgaaatcattttttctcatattctttctttttgcccaagtacagagatcttgttgaaaataagttgggttctttccacacactaaccctcacctcccctagagaaagagcagagattgtcctcactctgagtctaggggaggagctgttcctgtacaattcagagcctgcagagacccccaggtgcagcttcagtgagtcagacatttctccatgtgggcgacctccagtgcctgtgactgcttctcaggcctaattgtgggttaagaattaggacactctttaagttatcacatctgaatcctattctgaaaatcaccataaagagagatagttcaatggctattctcctgacataagtttctctttattacttggttccaagtatggagaaacatgtgaccctatatttgtctgaatccaacatcagaatccactgcattactctgggatactcacggatcgaacacaggtgagctctttattctcacagaaatgtatgtagttgggaatttcaacatattgtccagaacgtgtgcctgccaacaactgtgtttctcggtgcactcttggcctggtgaagccctcacagaccctctccctcatgtgtgtcatctctgcattctccatcacaaccagtgcttcctcctggagctgcatccatcagcccctctctgggagggaatggagtggattgggtgcataggtcatgaagggagcacacattactcccctttcctcaagagtccagtcaccatccccagatccatgtccaaaaacagttcttcctacagctgagctacatgagcaacaatcacatagccatatatttttaagcaaaagacacagtgagggaatcacagtgtgaactcacaccaaaacctccctgtggggatgcataggacagaaggggttactccggagcccagggggctctcaggacaccaaggggcactcaagaccattgtagaggcacgcaggtagccgggggctctcaggaaccatggaggaaaatcaggacaccaaagggtgctcggtacagcgaggggctcaggacaattgtggggattcagaaagaacaggttcaaggctcagcttcagggcaggtgcagctggtgtgaaaaggggctggatgaggcgttttgtgtcaccatcatgtttcaccaccagacaccctccactacatctgttctaatgcatgtgtttgtatgattagaaaatgatattgatataaatatataaccatagctaggtgtgtctttttctgccttccgtcctcccttcttctctctctctcacacagaaatttacatacacccaccccacaacacacataaatctataacttttattacctgatgtattcaataaacctgattaatgtgttttgcagcttcattgtttatgctgttgtagcaataaaaaccatctgtttcccagctgtgtacttctctaagctgagtagcatctttgttcataatacccagaatgaaaaacaacccaaatgtcaatcatcagcttaactggtaaacacattgtggaaaagtcattcattgacatactacccactactaccatcagctaatgttggctatgctcaaaagcatggttaaattcacaagtacttcagatgagtaaaatgagcccaagtgataaaagtgcatacataggatacaactttcataagttctatagaacaaaaagtaatctaaagttgcaaaaaaaaaatcagtagttcactgtgaatattgtaggagaagggatggtctaggaaggaggaattatggaacaagataaaatgttgagggaattgacttgttatctatgttgatagtgataatgtctatgacaatatttgcaaaattgaacacttcatgtggagattattgtttttagtttagccccattaaagatagtattaattagaacaggtataaattggtatcaaaggaattaaagataaataaaatacatgaaaagtcagagaatcctgaatatacacatgaatgagcactggacatctctgtatttttagagaagcactagaatacagcaaaataatggcataattttacatcactaagaaagtttatcaaacccaccaggcatgttgtattagttcattttcacactggtataaaaaactacttgagactgggtagtttacaaggaaaagaggtatagttggctcacagttctgcatggctggggaggccacaggaaacttacaatcatggtggaaggtgaagaggaagcaaggcacgtctcacagcccagcaggagagagatagaggaggggaagtgacacatacttttaaaccatcagcggttgttagaactcactcactatcatgagaacaacatggggaaactgcccccatgatccaatcacctctcacctggtccctcccttgacatgtggggattagaatttgagatgatatttaggtggggcacaaaaccaatctatatcacatgtccagttctgtcctggagttgtttcagggatccagtgtgtcctgttgatagaaacagtgacaccaagttcatattatcagttgtagttgacaccatgcaaagccaagagatctcaagtgagatttagtgtgtatgttgtgtctaatgaagtcacacactcagagcaagtgaatagggaaaagttcattatctacactgtagaggtgtctgctgagtgcagggcaggtctcccaggaaaatctaaaatggcttgaaagaaaaccaaaggagactggctcagggtttttataatggtttagtggtgggggcaaagtgaagcttcccactcacagatgggggtttatagggtttgaaactcccactggcatcaaatgaagaagctcctgtgagtctgaactagattcatcttgtgtggcaaaaaaggagacgatggaggagtgagccttaagtaatcagcagtcatgcaccaaaagatagagtgacaacttattccatgcagcaggaataaaaataatgaataagaaagaagacaagggttcagtatgggtggacaacacccagatctgcagaaatgagatgactttagaaatgtaagcaaagaataatgagaaaaataagaagtggatggaaaattaaacaggggcctggtctaatgtcttgggtagaagcttttcacaatcaaggactatcagcttattctgcaggtcttaggtcagccatctgcttaaaaacatcagaaacgccagagggtctatgaggatgctcagtttaacatctcctatttgagtagctttacagttgtgtggaattcttaattgattattttttgtttgtttttagggacaggctctcacactgttccacagcttaaagtacagttgtgtgatcatagctcaccttaaatttgagctcctgactcacacaacctttccatcttagctttctgagtatctacaactagatgggcacaccacccctaccctccttattttttaaacattttttcatagaaatagcatctctttatgttgctcaggttggcttcgattgcctggtctcataggatttccctcactttgcttctggaagtggtgtgattatagggaagatccactgcatctgacctgaatttattctttagttgtaaaatatgaagccaataattaactgcctgaatgttttctgcagtgagttagttaaaagcatctgataaggttccttcctatgtgattcacgagcagtattttccgctgatgttccttccagtttccttgctgaagatcacagggaattgtggaaaatatgtagtaaaaaggcagccttaaactcttcattgttagagtggatatcacacaggaatcactttcagtattttgtaacacatgcatgcaatagagcaaacatgatctctgggggtaaagtctataaacgtatgggccttttagctaccaagtcatagggtaataactgatgtaccctgaggactggaccatgattccatagtgctagtggaagaacccttgaccaagggagttttacattttattaaaatatgtagagatgccactttttaaacattcccagaaggttgtgagtgggattgactctgtctcgtatgaacaaagacaatgccctccatgattagataatattataaactagattgagctacagtgtttgctgtattgaatcactgtatattttattttttagctccatgttagttttttgtctgcgtgttagcgttggctttaaaatgatattaatcagctctgtagtaagtagaaattcatctgagagtttctttccttgttttccagtttgataggatttccagaatacataagaaccctctctgtttgtaaaaatattccaggccaggccagtggctcatgcctgtaaacccagcactttgggaggccgaggtgggggggatcatttcaggtcaggagtttgagaccagcctggccaacatggtgaaacctcctttctactaaaaatacaaaaattagccgggcatggtggtgcttgaggattgcttgaaccctggaggctgatgttgcagtgagccgaaattgtgccactgcactccagcctgagagacacagcgagagtccatctcaaaataaaagaaaacaaaacattccaaagttatgcacaatctagaaacatatgtacttaattctcatttttaatttattaaaaagctctaataagttcaatgttttctgccttctcagttgatttcacaacacatataataatatatcctaaataaaagtttgttctcttaatacaaattactagttaataacccttactttattattgaggtattatccatcagtgttcatcaatgctctcaatgggactcttacatagagaatatacaaaatattttcctgatcatgacataaaacagatgtgaacacattcttagtattcagccatgtctcctatcatgttataaaccacatgctaactttgactttattggaacttgttctaatttcaaactagttattttttatcttcatgcagctggattattatgtgtggttatttattccgagagtgataaagacaacattaacaattttcactgcaggcatgtctaggcaaccccctgtgcacaatgaccttggtgcattggagattctatggggactcttccctacctgcctaggagagttctctgccttctacctctatcattttcctctttgaagaaatacatctaactgtcgttagaatagagacaaagacaaatcttaactgcttccagctgacgggggatgctgtttggggaagatctctcttggaggcctgtctaagggaccccaggaaaagggagccattatcccaggcttcagttgcatgagcatttggagtttgatggtctgaaaacgagaaaaggcaaatcagattattagaagacatgtatccaaacctaacaaggtggtcaaggtggtaaggacagtttgaaagaaaattccaaggctgctgacatgcccagataactgcggctgtagttatgcctgctaaggtttgggcgcatgaggcttggcttttgtcagctccctgggatttattttcccaaacaaagaaacctccaggttaggggcaccctattcattcccatcacctggcatgatttaaaggataattgcttagaattaaaatattgatacagatttttttatattccccatcgctttttgtttcttctgggctgtagccagagatcattgattggcgctcaggaataagcagtcagtctaaaatgcaggcaaatacttaaacaactgaagagattagaatttaaagatgatcgtatgatatgttttgaaatacaatttttctctttccagttctggtttttgtcagaatcaagtaattgtaagactgagttgtttgcaaaataaactttagtcttaaacttggcctgattatttgcataaagtgcagcaagaatattaataataattctgtaggaaaagcctgcaagcaccaggagtttcacagtctaacactatgagcacgtgcatcctcacgcaactcgctgaatatttccaagccagcctgttcctatcttaaatgccatccagttgtatctgccccaggtacactaatatatgggtcctgcttctctgcagcctcctctctcctcagatttcaggttttgtttattgtttgttttctctctgatataaactcaaatatgttgaaggtttttttgtgtgtggttgttcaggtttgttgttaatgaggtcagaataagataatactttactctttttatttatttatttatttattttttgagacggagtctcgctctgtcacccaggctggagtgcagtggccctatctcagctcactgcaagctccgcctcccgggttcacgccattctcctgcctcagcctccagagtagctgggactacaggcgcccgccaccatggccggctaattttttgtagttttagtagagacggggtttcaccgtgttagccaggatggtctcgatctcctgaccttgtgatccgcccgcctcggcctcccaaagtgctgggattacaggcgtgagcccccgcgcccggcccatactttgctccgttttatattcccatgctttagtagctgcttttctctatcaaatccattaactgagagaacaaatcacatttagttacaggtgaacaattaaatagtttggcatatatttatgtactggaacataacgcagcttgaaatcaaggcatgcctcactcatataaacaacatggctaaattctcaagtaattctgtttagtgaaagaaactaaggagttaagagtaaattttatatgatacatttgtaggaattttagaagatgccattattgtaaattaacacggagaagatttgagtttgtctgacaatacgctgttgggagtaatgtggatgtgagttgaatttcagagaaataaaagaaagatttagggattaatttaattattcaaaacttgattgaagtgctgagcaaatggctgcaaacataggtcaacatttttcaaatccttcactataaatttgaattaattacttattaattacacttgaataaagcaataacgaagaaaccaataaaataacatttgactaaaatggagcaataaacagatcgatgttaacacaaggaatatgactgacttatgaaaacatgcacatgaaccatggttcactctacgtattttggtaaattacagaaagttgtcataacagatggggaatcctgcagacttcactaggcatggtccacgctgccctggagttgtctcaggggagctgcctcctccagtggttagagcacaggcccaggtaataggactaatttttttagatgtgtaattttagacacactgcacaactgctgtgttctctgtgtaaattatctcctgtaaaatgtaacattgaaacctgcattaaacatattgtataaatatgtaagaataaaataagattatgagagctaaatattaatcaaggcacaagcacataatataaaattatattttcctgaatgatacaattattccaatctgtcccaggacacttcatctgccctgagcccagcctctcctcagatgtcccaccacagagcttgctatatagtgggggacatgcgaatagggccctccctctgctgatgaaaaccagcccagctgaccctgcagctctgggagaggagcccagcactggaagtcggcggtgtttccattccgtgatcagcactgaacacagaggactcaccatggagtttgggctgagctgggttttccttgttgctattttaagaggtgattcatagataaatagagatgttgagtgggagtggacatgagtgagagaaacagtggatgtgtgtggcagtttctgaccttggtgtctttgtgtttgcaggtgtccagtgtgaggtgcagctggtggagtctggggaaggcttggtccagcctggggggtccctgagactctcctgtgcagcctctggattcaccttcagtagctctgctatgcactgggtccgccaggctccaagaaagggtttgtagtgggtctcagttattagtacaagtggtgataccgtactctacacagactctgtgaagggccgattcaccatctccagagacaatgcccagaattcactgtatctgcaaatgaacagcctgagagccgacgacatggctgtgtattactgtgtgaaagacgcagtgagaagtcagtgtgagcccagacacaaacctccctgcagggtacctgggacaaccagggaaagcctgggacactgtatactgggctgtccccaggggcaagtccaggtggtataagcctaggtttcctgtcatggtctagggttgcctttttagcaacttaccccagagaacttctctagatttccaattctgtaataacatttgatgtcgtctctggctgcaaaatgtcccctcaactttgtatctttttttttttttttgtaacaggaggacacatcctcaccctgcagaagcctgagtgtcacattgggggcagaaatgatctgccttgatctcactgatcactgtcccgaggaacataccccacaggggaccctgatgactccagtaatgtctctgcctcaaaaccattgaagagtccttccttccattagagttgaccacagcacctgggcttcagcacaagccataccacagacgtcacaaagcagcagattgacacctgatccaggtgcattttctcacctttagaggctgagagaggggtgtattctcaaggtcaacacactctttgtggatttttacagagaacacctacttttactttatttcatttgaagataaatgaacaaatgtgcagctgcaaatgattgtaattttcacatttattccaattccaatatttctgaattctgcatgatgtcctggcacagggttgtgttttctacaggtatttttcatcaaaccaagaaaatgcattttccactttccgtggtttttctccatgtgcagaggccttgagtagagcacgtctgactgtgtttgttttcacgctgctgataaagagaccttgagtagatcacgtctgactgtgtttgtctgttttcacgtggctgataaagacataccagagactgggaaacttacaacagaaagagttttattggacttacagttccacgtggctggaaaggcctcacaatcatggtggaaggtgaaaggcacatctgacatggcggcagacaagagaagagagcttgtgctgggtctcccctttttaaaaccatcagatctcatgagactcattcactattaagagaacagtgcaggagagacacaacccccataactcagtcacctcccactggtccctcccacaacattgagaattatgggagctacacatcaaaatgagatttgagtgaggacacatccgacccatatcattccaccccaggttccctcccaaatctcatgtcctcacatttcaaaaccaatcatgccttcccaacagctccccaaaggctaaactcatttcatcattaactcagaagtccacagtacaacatttcatctgaggcaaggcaagtcccttccccttatgagcctgtaaattcagaagcaagttacaagcattgggtaaacacacccattacaaatgacagaaattgcccataacaaaaaggccccatgcaagtccaaaatccagcagggcagtcaaatcatagagctccacaatgatcacctgtaactccccttctcacatccgggacatgttgatgcaataggtgagttccgatggtcttgggcagctccacccctgtggctttgcagggtacagcctccctcctggctgctttcacaggctggtgttcagtgtctgtggattttccaggcacaaagtgcaaactgtcagtggatctaccattccagggtctggaggatagcagccctcttctcacagctccactaggcagtgccccagtaaggactctgtgtgggagctctggccctatatttcctttcctccttgccctagcagaggttctccatgaatgatccaccactgcagccaacttatgactggacatccaggtgttttcatacatcttctgaaatctaggcagaggttctcaaacaccaattcttagcactctgtcgataatggttcatttttttggcctgttcattactggtatttttcaaaggaatctcacttgaatctttactcttttgcattttgtctccatgacaatgttgggaagttttacctccaccatcataacatgatctagtgatctcacacatttgtggcaaacaatacctacaaattcagaagctctttgcttttctttccatgaaatataattctttctgttctgtgtataagcatatcttagcaactctgtgcacacccacatagatgtccacaagcctatgaattattctctgtaaataaaaatttatatcaatttccctcaatgttcataattctcctgagggtgaggaagctccttctcgatctgttcaaacaaaatgcccagaaaccatctggtaggtaaggagttcacctggctctggtgtggggtctgtctctttccctctgttgtcacacaggtcagcccagttgttcaggtcctaagaagaaagcccaggtttgtcctgattttaaaacacatcaaacttctgatgactctcctgttacccacatccatggagatagattatttattatataattcaccaaactaatgtcaaatgcccaagttgcaataccacacatcctagggtatgttcatgcaattcaatggaggagaaagtctttcagagacagatggatctgaaatgataaatatgtgggtaaggactctgggcttgagtatcattgtccagccatgtttcacaagtgtgtcctgtcagggaaggacaagagttccttgtgttctcagagggaaggggtcacagagttcctctctggttcccaggaaagataatcgcactaatcttcatgatcttcatgagactatcctccagtgctgacctgttatagagtttttgtctgaagttctcactgcaatccccaatctacatattttcaatcagaagtgtttagaggccaggacatatcttcacggtcacacattgagaaggatgtagatatgtcccactaccttctcctgagatctcagacagaatcccagatttcaaaaggacacagaaggacagctctcaggtgcttttaaaaaatgacccacttccagggacagggagcttccctataaccatggtggatgttctgaactacaataaacattggatggatccaggattgtttgaagtcactgtcattattacattcagctgctgtttcaatgtgtctgaagtagtaaatgacaatttagatgacaatttatatgaatcttcaagggtagaacaatattgaccatattccaaaatctgtccttgatccatgatcacactcatctcccagaccaggtccttcagcacgtctctttacctgaaagaagaggactctgggcttggagaggggagaccccaagaagacaactgagttctcaaagggcacagccagcatcctactcccagggcgagcccaaaagactggggcctccctcctcctttttcacctctccgtacaaaggcaccacccacatgcaaatccttacttaagcacccacaggaaaccaccacacatttccttaaattcaggttccagctcacatgggaaatactttctgagagtcctggacctcctgtgcaagaacatgaaacacctgtggttcttcctcctcctggtggcagctcccagatgtgagtgtctcagggatccagacatgggggtatgggaggtgcctctgatcccagggctcactgtgggtctctctgttcacaggggtcctgtcccaggtgcagctgcaggagtcgggcccaggactggtgaagccttcggagaccctgtccctcacctgcactgtctctggtggctccgtcagcagtggtagttactactggagctggatccggcagcccccagggaagggactggagtggattgggtatatctattacagtgggagcaccaactacaacccctccctcaagagtcgagtcaccatatcagtagacacgtccaagaaccagttctccctgaagctgagctctgtgaccgctgcggacacggccgtgtattactgtgcgagagacacagtgaggggaggtgagtgtgagcccagacacaaacctccctgcatggacgcggaggggaccggcgcaggtgctgctcaggaccagcaggtggcgcgcggggcccccagagcatgaggccgggtcaggagcaggtgcagggagggcggggcttcctcatctgctcagtggtctccgtcctcgccagcacctcgctgtcaccagggctcctctttctttattatctgtggttctgcttcctcacattcttgtgccaggaaagaaacgaggaagacaaattttcgtctatagttgaagcttcaccaattactaggaacttgcctacaagttcctgcatgacccattataacttatcgattaaaaaatatatattctaatgcttctcaccatctcttgatttgtatcatcaactgaattgtaccctctttgaaattcatatgatgaaaccttaaattcaatggatctatattggaattttaatgaaataattaaggttaaatgtggtcataattgtaagaccctaatgcaatagacgtgttgtctttataagaagaggaagagacaccagagacctctcacttttcacgtgcaggcagagaagaggccatgtggagacatagtgcactagaaggtggcccagtgcaagccaggaagaagccgcgccaagaaccagccctgccagcacactaatcttcaacattcagactgcagaattttaagaaaatcaatatttgttgtttaagccacccactcctgttgtcttcttatgaagatccagacagactaataccacataactctgttagtgctgtcccctggatggagaattagcctcctgaggctgggcacatctctcagatttccacataaaacaggtaaaaaatagtagttctgatataaaaacttgtcatgtccctgttggccaatttctgggcaaggtcttttaaataagccaagtttgcggggaaatggagaccatatgtttgtgggactctaaccgtggaatctactgcattgctctagcagaatcaaaaattgaacaccagtgagctctttattctcattaaaatgtgtgtctttggaaatgttaacattctgtccagaatctgtgctcacaaacaactgtgtttcttagtgcactcttggcctggtggagccctcgcagaccctctccctcacctgtgctgtctctggattttccatcacaaccagtgtttcctgctggagctggatccacgagtccacatgggaaggactggagtggaccaggcgcacacgtcatgaagggagcaaaaattcccacccactccttatgaatccagtcaccatctccaaattcgggtccaaaaaacacttgtttttacagtggagctatgtgagcaacaagctcacagccatgttttaaagaagagacagagtgaggggaccacggtgcgagctcacacccaaaccttcctggaggggtgcacaggacagcaggagtgccgatgatggaagggggtggtctggattccagggcacacgcaagaccattgtagaggcactcaggtcacccgggggctctcaggaaccatcgaggaaaatcaggacaccagaagagactcggtacagcagggggctcaggaccattgtggggactcagaaacagcaggttctaggctcagcctcagggcaggtgcagatggggtgaaaaggggctggatgaggggttttgtgtcaccatcatatttcaccactagacaccctccactacatgtgttctactgcatatgagtgtatgattagaaaatcatacttctataaatatataaccatacgaaggtgtgtcaagttttcctcttcaacttctatcggccttgttcgtaaggactaattccctgtaattacttgaggacctcataaattgtggtcagttttgtaggtttcctctctttccttgtctccctttccccttattctctctcacacaaatggacataatccccactccacacgcaaagaaatctataactttcattacctgatgtattgaataaaattgattaatgtgcagctttcccatctttgttgttgttcatgctgctgtaagtataagaaccatgagattctcagctgtgtacttctccaagctgagtggcagctttgcttatcatactgagatggccaacaatccaaatgtcaatcatcagcttaactggtaaacaaattgtggaaaagtcattcattggcatactactgactgtgaccacaatatactaatgttggatacgctcaacagtatggttaaattctcatatggtgagtaaaatgagccaaacaaataaaagtacacacatatgataccacttttatacattctcccatccaagtactaaccaggcccgaccctgcttagcttccgagatcagacgagatcgggcgcgttcagggtggtatggccgtagacacacttttatacattctatagaataaaaactaaagttacataaagaatcagtagttcactgtgaatattatagaagggaaagtgtagacaggaggaattacagaaaagagaaaattttaagcataattgacttgttatctatattgataataatgatgtctatgataatatttgtacaattgaacacttcatgtgaagatctttttttttagtttaacatcattaaagatagtactaactgtaacgtgtgtaatttggtagaaacggagtcagacagagataaaatacataaaaagtcagagacacctgaatattcacatgagtgagcctgcacttctctatgtttttatgaaaacactacaatacagcaaaataatgacatcattttatgacgtgaagggggtttattaaaccactccaggcacgttgtattagtttgttttcccactgctacaaagaactacctgagtttgggtaacttataaagaaaataggttattgactcatagttctacatggctggaaaggcctcaggaaacttgcaatcaaggcagagtgtgaaggggaagcaagagacatctcacatggcagcaggagaggtggggagaaccaccacacactttaaattatcagatctcctgagacctcaatctgagacctcaatcatgaaaacagcatggaggaaccaccccatgagcccatcccctctcaccaggtccctccctggacgtgtggcaattccaattcgagatcagatttgggtggggacacagaaccaaaccatatcacatgtccagttctgtcccagagttggttcaggaatcagatgtgtcctgttaacaggagctgtgacaccaagctcccagcaccacttgtagttgacgtcatgcaaaggccaagatatctcaactaagatttagtgtggatgtgatgttggatggtgacacaccctcagaccaagtggatatggaagggataattatctctattctagacgtgtctgctgagagcagggcagttctctcaggaaagtgcaaaatggcttgatagaacagggaaagagagggcctcagggtttggtggtgggggcagattgagtctttccactcacagaaaggggtttatagggtgggaaactcccactggcttcaaataaggaagctcctgtgattctggaccgatattcaccttgtgtgtaaaaaaggaggtaatggaggaatgagccttaagctatcagcagtcacacaccaaaatacagtgtgacaagttattctatgtagcaactataaaaataatgaataaaaaacgagataagggttcaatatgatgggcaacactcaggtctacagaaaatgagatgagtgtttataagtcaaagcaaataataatgagaagcaggaggagggtgtgcagaattagacaggggtccaggtccagtgacttgggtggaaaccttttgctattaaggattatcagcttagtctgaaggtcttaggtcagctatctgtttaaagacatcagaaacaccagagaatctttgaggatgctcagattaacatctcctattttagtagccttgcagttgtgtgaaaaccttttttatcttatttcattttattatttatttatttatctgttgagatggaatttcgctcttgttgcccaggctggagcgaaatggcacgatcttgactcaccgcctcttccacctcccagattcaagcgattctcctgcctcagcctcccagtagctgatattacaggcatgcaccaccaggcccagctaattttgtatttttagtagagatggggtttctccacattggtcaggctggtctcaaactctcaacctccggtgacccgcccaccttggcctcccgaagtgctgggattacaggtgtgagccactgctccgggccgaaaatcttattcattcttttttgtttgtttttagagacagagtctctctctgttgcacgttgaaagtggagtggtgtgataacagctcactgtaaatttgaactcttggctcacagagtatgttcctatgtatcgtgcaggtgtgtctgtgtgtgtttacccggcttggggtcctctaatttttggatctgtagttaggtgtttcacattcttaagatatttttcttaagaaatatatcttaagatataagtatatcttaagatatcattaattcttaagatattttctctgtttctaatttctatttttgaaatttgaaatatatctacactatactttttgatgttagttcttaaatttcttcactctttttccctttgaaattcactttgtgtaatttccagtaacggagttgaagtccctggtttcatttaagagctgagcgaattctactgctgagcgtgcccaaggtatattcaactttatactgcatcacttttgataattttatgaatttccatttgattctttcttagtatttctctctgtcagtcacctatctagtcttgcactgtgtccacattttctttcagatacttttaacaaattcaattactttaaatatcctacttaataagatagttctagtattgtgtcatttacaaatatcaattctgaggatttttccattatgactttggtgttttttataacttatatgactttgatgaatgttataatttttgttgataaccagccatatttggacccttgatattgacgtattattttattttgtgcatttctgcctgtatttgaccacaccctatctgtgctgggccttgattgtggagatgtctgtgcatctcttcagagctacatttgacatttacttttgcaacggctgtagcagttgaagtgtgttcttctatgtccactggagacttcagatactctagtgataccttgttttcatgcctgcttggctttgtctattcacctcattccattctacagagaatctccttcacattcctagggtggattaaagtgttatatttaactgccaattgtgaaattggcggaaggcattagactaaaggaagaaactgacctctcgttgggccataattctagaaagccgttgtgatcctgagtctgagtgtgaccttccaagttttcccgaccctcctgcaagtgagatactggtctgtgtgttcttgcctcttcccctggggtagagtcctcctgttttccccagttgttccctcccacagctctcacaatctctgttggtgtccccatcttccagatctgctgccatgacctgcagattaaggctctgattccataagaaactgaggggagctgcttctcaatagatctttgatggggacctctgttcccatatcagttcatgaggggctgctccagtgccctaggatgctgattttcatggcttgctcctgcagggtaatatctgagtttcatagtgggaatcagagagttgggtctggatgcatttcagaagtgtgggctctcattctctcccagacagtcactttgggaaggatagattcttgtgactgtaaaggttcttcaagagaatagcacaactcttcagtatgttgtcccttagaatttctcactacaacacgcttaacacactcgacttcaagcaatgcaatgtgtatttgtgctccatcttgtaatggcctacgttgaatacgacagactgtgcctcaggtaatttcatatcttgactttattactctgtactagaacttgcctctccctagatttcaattttttttgttttaaaccttcagttatctgaagcatttaataaaatttgcgaacttccatcttttctgtttatctgttattgctgatgttattgttttaaaaataaatatatatttctcattcatgtacatttttaagctgagcagcatatttttaagtaaaacctggaataataaaagaatccaaacatttttcagctgccccaaaaaaaccaaattatggtaaatgtgttcactggaacactactcatcacttataataaatatatttctggtacacagagcaacaaagaaaaatatctaagtgtttatgctgagtaaaatacgccagacaaataagaatatgtaccatattactccatttatgcaatttcttttaagtgaaaaagaatctaaagcaatatccagaagatcagtagttacctggaaaaagggtagaccaaaggaaggggaaaggaggaaacttacagaagaacaagagaaaatgttgaggggagttcacttgtccagcttggaaatgatgggttacatcatgttgatcaattgcacactttaaatatgtgaagtctattatctgccaattaacactcgcaaaatttattgcaagcagacaaatgaaaaattagacaaagaaaggatggtataaagatagaaaatatatattaaatgtcagaaatgtctgagaatttaactcctgaccctagttccgtccttatttttaggtgaatggtagcgtgcaccaaaatcacacacattctcagtacaggaagtgggttccacaaagcacacgaggtatgtccaattcttaccaagatttggttcagggagtaacagtgatgaggaatcacaggcccagataccggggctcactcatctcagacatgacctcgtggacacacacttagcccctcctccatgtgtaggttgacttccacatatgtaaatggagaaaccattgactcctacagaacataatttacagaaatatacaaaagataaaatagtgcaaatacttatcacaacaaaatttcctaataagacagtgtattttccaaataccgtaattgtcacccaactcctgtggggccgtgtcattttatctggggtctgccgtctcctcaggattcccaccccagagctctctatgtagtaggagacaagcaaatagggccctccctctgctgctgaaaatcagccaaatcctgaccctgcagctctgggagaggagcccccgccccgggattcccagctgtctccacttggtcatgaacactgaacacagaagacacaccatggagtctgggctgagctggattttccttgttgcagttttaaaaggtgatttatggagaatgagacacactgagtgtgactggacataagtgagagaaacagtggatttgtgtggcagtttctgaccagggtgtctccgtgtttgcaggtgtccagtgtgaggtgcagctggtggagtctgggggaggcttagtaaagactggaggggtctctgagactctcctgtgcagcctctggattcaccttcagtagctctgctatgcactgggtccaccaggctccaggaaagggtttggagtgggtctcagttattagtacaagtggtgataccgtactctacacagactctgtgaagggctgattcaccatctctagagacaatgcccagaattcactgtctctgcaaatgaacagcctgagagccgagggcacagttgtgtactactgtgtgaaagacgcagtgagaagtcagtgtgagcccagacacaaacctcctgcagggtacctgggacaatcagggaaagcctgggacactgtatactgggctgtccccaggggcaagtccaggtgatataagcctgggtttcctgtcatgatctagggttgcattgttagcaaattaccccagggaccatctctagatttccaattctgtaataacatttgatgtcgtctctgactgcacaatgtcccctcaactttgtatcttttttttttttgtaacaggaggacacatcctcaccctgcagaagcctgagtgtcactttgggggcagaaatgacctgccttgatcacattgatcactgtcctgaggaaaataccccacaggggaccccgatgactccagcaaaggctctgcctcaaaaccattgaagagtccttcctttcattagaattgaccacagcacctgggcttcagcacaagccataccacagacgtcacaaagcagcagcttgacacctgatccaggtgcattttctcacctttagaagctgagagaggggtgtattctcaaggtcaacacactctttgtgggtttttacacagaaaacctgcttttactttatttcatttgaagataaatgaacaaatgtgcatctataaatgattgtaattttcacatttattccaaatccaatatttctgaattctgcataatgtcctggcacaaggttgtgttttctataggtatttttcaacagaccaagaaaatgcattttccaatttccctgtttttcctccatgtgcagagaccttgagtagagcacgtctgactgtgtttgtctgttttcacgctgctgatgaagacataccagagacgaggaaacttacaatagaaagagttttattggacttacagttccacgtggctggaaaggtctcacaatcatggtggaaggtgaaaggcacatctgacatggcggcagacaagagaagagagcttgtgctgggtctcccctttttaaaaccatcagatctcatgagactcattcactattaagagaacagtgcaggagagacgcaacccccataactcagtcacctcccactggtccctcccacaacattgagaattatgggagttacacatcaaagtgagatttgagtgaggacacatccgacccatatcattccaccccaggttccctcccaaatctcacgtcctcacatttcaaaaccaatcatgccttcccaacagctccccaaaggctaaactcatttcatcattaacacagaagtccacagtacaacatttcacctgagacaaggcaagtcctttccacttataagcctgtaaattcaaaagcaagttacaggcattgggtaaacacacccattggaaatgacagaaattgcccataacaaaaagaccccatgcaagtccaaaatccagcagggcagtcaaatcataaagctccacaatgatcacctgtaactccccttctcacatccgggacatgttgatgcaacaggtgagttcccatggtcttgggcagctccacccctgtggctttgcagggtacagcctccctcctggctgctttcacaggctggtgttcagtgtctgtggattttccaggcacaaagtgcaaactgtcagtggatctaccattccagggtctggaggatagcagccctcttctcacagctccactaggcagtgccccagtagggactctgtgtgggagctctggccctatatttcctttcctcattgccctagcagaggttccccatgaatgagccaccactgcagccaacttgtgactggacatccaggtgttttcatacaccttctgaaatctaggcagaggttctcaaaccccaattcttagcactctttccataatggttcatttttttggcctgttcattactggtatttttcaaaggaatctcacttgaatctttactcttttgcaatttgtctccatgacaatgttgggaagttttatctccaccatcataacatgatctagtgatctcacacatttgtggcaaacaatacctacaaattcagaagctctttgcttttctttccatgaaatataattctttctgttctgtgtataagcatatcttagcaaccctgcacacacccacatagatgtccacaagcctatgaattattctctgtaaataaaaacttatatcaatttccctcaatgttcataattctcctgagtgtgaggaagctccttctcgatctgttcaaacaaaatgcccagagaccatccggtaggtaaggagttcacctggctctggtgtggggtctgtctctttccctctgttgtcccacaggtcagcccagttgttcacgtcctaacaagaaagcccaggtttgttctgattttaaaacacttcaaacttctgatgactctcctgttacccacatccatggagatagattatttattatataattcaccaaactaatgtcaaatgtccaagttgcaataccacacatcctagggtatgttcatgcaattcaatggaggagaaagtctttcagagacagatggatctgaaatgataaatatgtgggtaaggactctggacttgagtgtcattgtccagccatgtttcacaagtgtgtcctgtcagggaaggatcagagttccttgtgctctcagagggaaggggtcacagagttcctctctggttcccaggaaaggtaatcgcactaatcttcatgatcttcatgagactatcctccagtgctgacctgttatagagtttttgtctgaagttctcactgcaatccccaatctacatattttcaatcagaagtgtttagaggccaggacacatcttcaaggtcacacattgagaaggatgtagatatgtcccactaccttctcctgagatctcagacagaatcccagatttcaaaaggacacagaaggacagctctcaggtgcttttaaaaaatgacccacttccagggacagggagcttccctataaccatggtggatgttctgaactacaataaacattggatggatccaggattgtttgaagtcactgtcattattacattcagctgctgtttcaatgtgtctgaagtagtaaatgacaatttagatgacaatttatatgaatcttcaagggtagaacaatattgaccatattccaaaatctgtccttgatccatgatcacactcatctcccagaccaggtccttcagcacgtctctttacctgaaagaagaggactctgggcttggagaggggagaccccaagaagacaactgagttctcaaagggcacagccagcatcctactcccagggcgagcccaaaagactggggcctccctcctcctttttcacctctccatacaaaggcaccacccacatgcaaatcctcacttaagcacccacaggaaaccaccacacatttccttaaattcaggttccagctcacatgggaaatactttctgagagtcctggacctcctgtgcaagaacatgaaacatctgtggttcttccttctcctggtggcagctcccagatgtgagtatctcagggatccagacatggggatatgggaggtgcctctgatcccagggctcactgtgggtctctctgttcacaggggtcctgtcccaggtgcagctgcaggagtcgggcccaggactggtgaagccttcggagaccctgtccctcacctgcactgtctctggtggctccatcagtagttactactggagctggatccggcagcccccagggaagggactggagtggattgggtatatctattacagtgggagcaccaactacaacccctccctcaagagtcgagtcaccatatcagtagacacgtccaagaaccagttctccctgaagctgagctctgtgaccgctgcggacacggccgtgtattactgtgcgagagacacagtgaggggaggtgagtgtgagcccagacaaaaacctccgtgcagggaggcggaggggaccggcgcaggtgctgctcagcgccagcagggggcgcgcggggcccacagagcaggaggcccggtcaggagcaggtgcagggagggcggggcttcctcatctgctcagtggtctccctcctcgccagcacctcagctgtccccaggggtcctctttctttattatctgtggttctgcttcctcacattcttgtgccaagaaagaaatgaggaagacaaattttcgtctgtagttgaagtttcaccaattactaggaactttcctagaagttcctgcatggcccattatagcttactgattaaaaaatatatattctaacgcttctcagcatctcttgatttgtgtcatcaactgaattgtgccctctttgaaattcatatgcagaaaccttaaattcaattgatgtatattggaattttaatgaaataattaaggttaaatgtggtcataagtgtaagactctaattcaacagacgtgtcgtctttataagaagaggaagagacaccagagacctctcacttttcacgtgcaggcagagaagaggccatgtggagacgtaatgcactagaaggtggcccagtgcaagccaggaagaagcctcaccaagaaccaaccctgccagaacattgatcttcaacattcagactgcagaattttaagaaaatcaatatttgttgtttaagccacccactcctgttgtcttcttatgaagatccagacagactaataccacataactctgttagcgctgtcccctggatgcagaatcagcccgctggggctgggcacatctctcagatttccacataaagtaggcaaaaaatagtagttctgatataaaaatttgtcatgtccctgttggccaatttctgggcaaggtcttttaaagaagccctgggggctttgtcacaaaagttgccttttatcatttattaggacataactgatgaacaatgagtaccagttggatggagactgaccactgaccatcttctgctgtctcctaagtatgccacagaaaaccacaccaacattactctatgtcttcaactttctaaatttgcactgattggtatttaaggcaggcccagcgttgaataactcctttagtttttgcttctctgggaaaggtcttatctatcctggccttggtcttcaagtttcagcaattctgggaagccaaggacgcctctatctcctcctccatgctctgcaactcacctgagaacagctttctcattggaatgtcttctgtttaaggaataagagtccctgtttcaggcttgggtgcctgagtacacctactggatccagcccaggattggagaaactttccagaacacatcacctgagaaatgaccagtcacactgttacactttcacaatttccgcttcctcatgagaaaattaaaattgcagagactttttcataagcgttgtgccatgtcctttcttgttttcttgcctgttcatttatgtcagaccaggtgccacatctatgtaatcaggttagaatcctgcctccagtaacacatgaaaaggacctatggttgtacttttggtctttgctccaaagtgtaaagattacaaaagtcatcaccctcattcttatgccaagagtcatctgcacaatctgatcttcaatacattttagaatccatcaaatgaatgaaattccattttttaaattaccaccccaaaaactagagagatgggcatgtccagaatagcagttgatggttgcttaactggaagagaagtttcagaagccacaagctgttgaaggcacttacgtggttagcactatagacgtctgcaagacagatgtggactagggtgaaatgacagttccagagggccgcactctcctcagtcttctggaatttccctctagaaatctccagaatctaaaaaatacaatccaaatatgtttcctatgggtcataactggggaagtttaattactgaaaaatatatcaggagccttctccaaaagatcctacagggaagaacttttccagaacctcatactatgtgaagggaagaaaaatctgcccattccagatccctccccacttcctccattattatacaaatgagtaagtttagccaatagggtaagatgtaagcaaatagtccagggaaactgaagccacaaaaaggagtaaagatgaaaattcagcttttcccctggagatgcctggtcaaggtcacagcccagaaaaggaatctgattgagtctctaggtttccatggtcagaacaagcagtgctgacccgcactgcacaatcctttctaaccaggatgatggctctggattaaatatgagagtgtgccaatgcacagtctctgaggagaacatagggacactaaaaaagcaatggcagggagttagacaaggacagtagagcaatatgaagcctctgacgtgaacatttttaaaaacaagatcttggaaactccctcattcacctcagcttcttttatcatgaagactttccaagattcttaactgagacaaacaaaataacaacctgcatgcacttccgaagtctccgcttgtatcctgtttgctttagatctctaggagaaaaatgtcagacacctgggcctagtgtcaatgtgggaggcactttctacagatgaggcacaagaaggaagggaaaacgtgtgttattggaatagtggatatgaagtgtgctctcatctgaaagcatctgcacctgctggaaatctcagatgcaacattcaactgcaagaaccaaggcacacccaaatctcctgtaagattttggattcattatccactgattcagtgcaactggagcttcagagaaggggctccctcctgtgtcatagcatccttgctttgagttcattagatttagtaaggctaatcaattgtttgaagagatggtgtcagcagcgtatgctgtcactgaaggagtattctaaaccaggacaaagccatttcatgttaggcgagggaagctggtggaaaatgctttatgagccccacaggaacttccttgcaaggcaagggctgggctggagggggcgcgcaggagccgcccagcacaggttccatccccggaggggtgcacaggaggctggggacgaggttccctctcagcgcctgtgtcttcctttggcaacaaaaaaaatcctaagtgttcaagaagttgctgatgtgtctttaagtatcctgttccgtcagagcctttcctataactgaaggcaaccagaactgtgttttaaagtcggttccgaggactgcaagtatcttaatagtgaggatataaaggataggaatggttttactaattgaaaggatacagaattgtggggttccgaggactgcaagtatcttaatagtgaggatataaaggataggaatggtttcactaattgaaaggatacagaattgtgggagtcactatgttcctatgaataaaaaattcagatttcagtgttaagtaatgttgcctacattgtgtgagtgacagggcagtggtggatctgagagtgtggcaggtgcacagacctagtgagtcagaaatcaatatggaaagatgaggatctatggatatgaactgaaagtaagtaaacagttcatgaaattctattaaatggagtaggaaataaaacccaaacttatccaaaacacaaattccttggcgattattttgggagcagtgagttcatcaggaaccccaaacttctcttacgtcttctgattcctgttgtccatgagatgagaaattcagctctaattgtacatcacagggcaaatctgtaaaccaggagtgtttctattgaggatcatggtggatcaggattccaggcaggtgctggagacactgtctcaggagcgcccagatgatctcagggggacctgctggacactcacgtgggacatcagcagtcactttctcagagtaaccagtgagctgtgctggtgcctgatgggactaggatggggtcaaggcaccttctcagtgtcatggagagtgattgttccagaaatcatccaggtggtctctacgctaatcaaatatgggttcacagggaggaacatgtgctctgggtgcttggtcttcagtgaaaggacgtctggccaccaaaagtttgtaaatggagcagggcatgcatttcctcaaggaggattagggcttggagcatcagcatcccactcttgtaaggctgatgtgtcatttaccttccctttcttatcccaaatcagggtcttcagctatgaaatgctctgactcatgaatatgcaaataacctgagatgcactgaggtaaatatggatatttgtcagccctgagagcatcatccagaaaccacatccctccgctagagaagcccctgacggcacagttcctcactatggactggatttggaggatcctcttcttggtgggagcagcgacaggcaaggagatgccaagtcccagtgatgaggaggggattgagtccagtcaaggtggctttcatccactcctgtgttctctccacaggtgcccactcccaaatgcagctggtgcagtctgggcctgaggtgaagaagcctgggacctcagtgaaggtctcctgcaaggcttctggattcacctttactagctctgctgtgcagtgggtgcgacaggctcgtggacaacgccttgagtggataggatggatcgtcgttggcagtggtaacacaaactacgcacagaagttccaggaaagagtcaccattaccagggacatgtccacaagcacagcctacatggagctgagcagcctgagatccgaggacacggccgtgtattactgtgcggcagacacagtgtgaaaacccacatcctgagagtgtcagaaacgccaggaaggaggcagctgtactggcatggaggggatgacaaaggttattagattgaagattttcttagaaaacgacttcaagtcattaaagaagaggaacaacataaatgtgtatttgtgaaattttaattgagagatttttcatacaacatttattctgtaagctatttcagggattggaatatgaatcaaattaataaagctgatatagacatcctctgaaggcatcttcgtaaacatcaatttctgaatcagtgttgtaaatattttggaacacagacacaagatcacatttttactctacttttatctctatttttaaaaaatgccaaaaagaatcttattttgtgcatgccccattttgaattcccaccgtcaatgcatgatagttcttggttttcctcattcaagttgtcatttgtcattaagagtgttgtgtgttttaaccattctaataggtgagtaacggtatctaatttttatttaaatgcacatgtccctaaaaaattcatatttaacaatttttatataatttttggtgagatgcctctcgtgatatttggttcattttttaaatgcattttttatcagttgtaagtatgcttgcatattgattataaaagtcatttaacaaattaaaataattcatttaacaaatatgcatcttggaatttttttctccaagtctgcagttgtcttttactcccttatccctgtgtattgcagaaaaatgtttgtgtgtgtgtgtgcctgtgtatgtacaaatttagattttaaaaatgtacatttttattcatttaaagatcatgtctttggcagtatatctgaaatctcattgtaaaagacacaatagtcattattttttccatgtctctaatcttaggacacaatcaactcatgagtgtttaaccttccctacctgattggaggactatccacctgagacatttggaatacttctgtaaggagatgtgtccttcccattatttctttatttagtcatctattgatgttcctattggtttatggatgtctatttcatactccgaagaagatccttgttacattacttgttttattgttcaaaacaccacagctttattaggtgctgggagctcatttagtttggatcctgcatccttacagcacacctcatctttttgtttttagacatttccctgtttccaagtattacaataaattctaagcttgttctctacgttaccttttttgtacatagaatcagccatttttctaaagactgcttgtttttcatgttaaagaacagtattgaaatttaaaaatgtgatcctgggtatgtgtgttgttaatgtggtatcagtacttcttctaggatatctccaccaattggcctagtaaatgggcatgtttataggaacccaagtttatggacacatcgaaactatttatgtatctaatcctctgtaatgtgattacattaaaaatgagaacacactggtgtctccatccaactatgctaccatatggatgtttccagccttccttccctcactgtccataaccacccactgcaaagtgaggaaccccatcccaccatatgccattttattacttagctgcacaatttcaggacacatgcatagcagtatcagaaatgtaaagctcgttggaaacatgtttatctactagaacagactgcttatgtgcagtttctttacactgtaaacttatagaatttcttcattttcaaagttgcttaggtcagcaacttcattttccactctcctcagtgaagtcatttcaatgacaatgtataatgtcatttatttgaaattctttcaaagccaaaactatagtccggtaaacatatagaggatattcaaggaatttagagagtgggtataaaataagtaaaaatggcactgtttaagaagagtaaaattgtttttagtgatatacaatggttgagacacaacacaattaatttggctaagctcatacttttgtgacagaaaatataaacctaaatatatacaatttttgtaaaaaaactttagcagttcattaaccccagggttaaacaagactgtgtaaaattatctaataacttatttgatgagggtggggatatcatgagacatatgcaacaaagaatgaaggcattttcctcatttgcatgtaagatgttaccattcactaaagacctttaataaaaaaaaatttctacgtgatccagtatttttttccttctgtcaagcaaataactcataggattcttttctttccttggttgagaaagattttctacaagcttcagcacacgtcaggcatacactgtccctgaatgggcatttaccctcagatgggtacacacacctgtcaacatgggggctcttctgtcagacaaacacacctttactcatgtggattcttccctcagacaaacacacatgtccccacgtggactctttcctcagattacaacatttgtccttacatttactatttcctcagaaaacagacattgcatcatgtggtctcttgtctcagacaagcaaacatgtcttcagtcagataagtctgtggatttccacattgactgtttccttacacaagcacctatatccaatatttaactgttttgtgagaaatttatcccttttctctggaaatgtatttttatgttcttactggacatattttttaataatgtttgctactatgaagatacccgaacactgtccatacgagagaataagaaagagtaataagcagattaaccctgtgcatccagacccaggagtcctttgatcctgcccttccgaaatggagacacagaggaaggatgagcaatgctgagcagtgcacccatgaccacaaaaggaaagacatggcaatgtgtcccctcccctcctcatgaaaggcagctcatcccctgttccttcaggccctggtgaggagccaccccatgtatattcccttgatcagtgtccacaccatggggtctgcactgatctgggcttcccttctcatcaccctcaatattagtgtcccttgtgaatcaggtccagctgcggctgttccacatggggccgttcttccatttcctcagtgtttgcagaagtcctgtgtgaagtttattgatggagtcagaggcagaaaattgtacagcccagtggttcactgagactctcctgcaaagcctctgatttcacctttactggctacagcatgagcttggtccagcaggcttcatgacagggattggtgtgggtggaaacagtgagtgatcaagtgggagttctcagagttactctccatgagtacaaataaattaacagtcccaagcgacaccttttcatgtgcagtctaccttacaatgaccaacctgaaagccaaggacaaggctgtgtattactgtgagggacacaggagagggaatatctgtgtgagcccagacacaaaaatctctgcagagagacaggagggaactgcatggtagatgctcctcataaccacaaaggggcagtcaggaccatcaggaggagctcaggacacctgggggtgctcagaaccatgaggggtgctcaggacatcgggggctctcagaaccatgaggggtgctcaggacatcagggggctctcagaaccaccagggggcgctcaggacacctgggggcgctcagaagcatcaggggtgctcaggatatcagagtgccctcagtaccacgagggggcgctcatgacaccaggggcactcagaaccaccagggggcgctcagtacacgggggttctcttaggaagcagctccacatcaggagcctgagaggctgtgatttcgttttaaaccttggtgattcccgacctggtcaagcaaaagtcttccccaggatctctcaccatttcttctttgtaaatccatgatttttttttacctacaaaacattaagttagaacagggatttaattcaacttttaattctgcagattttccgagtaatagtagcaatgttccctcaggacaatttttaaaattggttatttatatattttatttatgtaaaatgatactatcttgaaaatagtaaaatttttaaaatcatacctctaatcccagcactttaggaggttcgggcaggcagatcagttgcgctcaggagttttagaacagcctggcaacacatttagatcttttccatacaaaaagaaaaagaaaaagaaaatagctaggtgtggtgctacctctggtaccagctatttgaaagtctgaggtgggaggatcccttaagcctgggaggttgatgctgcagtgagctgtgattgtgccactacactccggcctggttgacagagtgagaccctttcttaaaaatacaaactgtttcaataagtagagctttgtgtctttgtgctgtaataatcagttgtatatattttctaactgtaactcagcatatgcatggtgttctgtttctttttctttcatttgctgtttttggaaattaaacacctctttaaacgctcttgttctcccctttggttcgcttcgggtgtcctgtttttcagactatttcttcatcttccctttttctttgaaagtctttttctttctcagtttccatgcaggataaagaaagtccctttactttctgtcctccaagtctggtgaacagttcccttctcttcataaccactgaagccaaccaagtttaggaggataacagttctccttagaatatgctcgtctacctgcagactctctgccctcctcacccttttctagggtcctgcacacatcacactcatcccatcccctcccttccctaagtaccacagagtgggctctgcagttcctgcttccctgtgtgtgctcagccctggggctcactagtgctttgatgatgacgttcaaatccccatgtgcttagactctctaagaccaccctctaggaagatgccattgtgagtgagtcctggaaatcatgggctgtgttcagtttcatattgctggatcttctctattttaaaggaatactggcaattaagattagagtttgtattgaatattcatgccaaaaaagttttctttcaaaacttttcaaataaaacaatttttcctgcctagtttgaaaactacaatgtaaattcaacaaataatataatacaattttaaaggtgacgtttgtcttattggttattcaatttattaaaaacagaagatatttaaaataaattccattgcacatttaagtgatgtatttgacaagaatggcatttacatacatttttaccaaaacacgtatttaaatatatttgtctttttaatattggtagaggcagacatacacgtagaaaagcatcattttgtactacaatctcaaactgtaaacacaatttaaattcagttaaataattagaataatatgaaacaggccgggcgtggtggctcatgcctgtaatcccagcactttgggaggccgaggcgggcggatcacgaggtcaggagatcaagaccattctggctaaaacggtgaaaccccgtctctactaaaaatacaaaaaattagccgggcgcagtggcgggcgcctgtagtcccagctacttgggaggctgaggcaggagaatggcgtgaacccgggaggcggagcttgcagtgagccgagatcccgccactgcactccagcctgggcgacagagcgagactccgtctcaaaaaaaaaaaaaaaaaaaaaaatgaaacaaataggtgcgttgttttggtgtttagatatacattcacttttgcatgggcacatgtatgtgtctttgctgggctgttgtgtatgtatgtgtgcttgtatgaccatcaagttttcaaatacatcattaaatttcatagttacattcgtcttggccaggcacggaggctcaggcctgtaatcccagcattttgggaggcttaggcaagcagatgacttggagttaagagttcaagaccagccttgtcaacatggcaaaaccccatctctacgaaaaatacaaaaattagccaggtgttgtggcacgtgcctttagtcccagtgcgacagggaaatgctgggtcagaaatcccacacaaagtctctacttggttaccacctaatggaactgtaggaagaaagccaccatccttcagaacccagaatggtagatccactgacagcttgcacagtgtgcctggaagagccagaaacactcagtgacagcccatgagtgtagccagaagggagattgtgccctgcaaagccacaagggcagaactgtccaagaccatgggaacccaccagttgcatccggtaacctggatttgagacatggagtcaaagaagactattttggaacgttaagatttgactgcccagctggatttcagacttgcacgtggcctgcagtttggaccaatttctcccatttgcaatggctgtatttacacaatgcctgaacccccattgtacctaggaagtaacttgcttgttttttattttacaggctcatagatggaagggagttgccttgtctcagaaaagaccatgggctgtggacttttgagttggggctcaaatgagttaagacttcaggggcctgttggaaagtcatgaatggttttgaaacgtaaggacattagatttaagaggcgccagtgttggaatcatatggtttggctgtgtccctgcacaaatctcatcttgaattgtatctcccacaattcccacgtgtcgtgggagaaacccagtgggaggtgattaaatcatggagggagttcttctttgtgcgttattgtgatagtggatgactctcatgagatctgatggttttaaaaaacgggagttccctgccctctctttgtctgctgccatctccatgtaagataaaacttgctcctccttgccttccaccatgatgtggaggcctcccaagccatgtgtaactgtaagtccattaaactttttcctctataaattactcagtctcatgtatgtctttattagcagtgtgaaaacagactaatacagcaaatatcaatctcttaaaatattttgttgttctgcatgtaatatagcacagtctaatatgggaggtaaaataaatcatccatggaccttcagatataagtcatagggtaattatgcctgtgtccctgaaggagtgaactagaggttatacacactagtggcactacctttggcaaagggtgttcaggggtttctgaaagttctgataattttaattttaaaattgaatttactatgtatttcttcatcaacctttccagaagatttttggcagtaagaacagcctagtattggagtaatactgatgaattagagagttattttgtaattattctcctgagatttgcatgaatcaattgatatagaagttcgtatgtcccaagttgaaacatcagaatcaagaaggcttcatcacccttaatggctgtggtttttggcaaggcagtacttcaattcagccagaaagagagacaacaataaaactttcaaatgcaggggagtctgacctcagtctctctcttataaaggcaaaggcaaagctgtgccacatcaagatttttcttcaagccttcagagtcaacattgggaatggaaaagccaatcactttgtccttagagaaggcgaagatctgagaggaatgcagagttgtgttcatgaaggtgatgacattgttatttcttctcctttgcccagtgactgctttcaagttgagtgtttcagatgtcagacctgacttatagggatggttgtgactgcacgtgactgacagggactgagactctatatctctaagtgtcctgtcctaggagcagctacaggagtcagccctagactggaagtgccctcactgaccctctgcctcacctgtgcagcctctggccagttgaagaaagttttatccctggaacatcttttgtcaaaaccactccaactagtattcatgacctatggtccacaccctcaagtacacagacatgatcatgctatgacttggtgtctagaagatccctgcacttttaattttacctctaatattagactccactttatcacatgcggacacagcagaatattttaagactttgatatgttatgctgaaaaattcaatagttcataaaagtctacttcccatcactgccagtgtttactactgagtaaggatctgccatcccctagggaggaactataatggatggtgtgccctgttagtggttatgggaatgaatccatcttgtggcaaatggcagcatcttcttgttttgcaagattaaatagttttctatggtgtataaatacaacattgtctttatccatttgtctatctactgacactcagattgtttccatatattggctaagattaatagtgtttcaataaacataggattcaactatcttaacaaggtggtaatttcatctgctttgggtatatttctaaaagcagaatttctggtcatataacatttccagttttaattcatttggtgcctttatattgctttccataattgtgaaaatatagagtggtatagccattatgaaaaacagtttcagttttgaggtatgatccataaacaaataatgtttgattatggctctccatgagaatttctaataaatatgatagaagtcaagaaagcgtctcacattaaagcaaggattaattttatcccttactccctcaaaagcaaaagattggaagcatgcatgatggaggctgttagcagggttcagaatgatatcataaaaggaaactcagttggataaaaatgttgggctttcagtcataggtatgtcgatactcaatatgaaaccgcgaagtcaaatgaggatctagaatgtgttcacttgaagcaacagcacattctcaaacgcacctattgctgcatcacaagggtgatgaacttttgaaacaagtaaagtgtgagtgcacagtaagtgataaagttatcacctttacatgaagtttgttcaatatgccaaaggcttttacagattaatcatacacaaatatacacaatgtatttttgcatacacagatgtctagaggatgattcttttagggaaaattcttcaggtcacagaaatctgtgtaagttggaggtcccatgaaaaagtatctctttataaatactgttctattgctcaattagggaaaatgatctctgttggagaaagcttccaattttgcagatttcttcattgcttcttgagttgtaagacatgaaccaaaaaattgactggagttttttggagtttcatggctggagtttcatggctgtgttgttaaaaatttcttatacggtttctttcaattatttgagatcagtttttctgatttttttctccagtagataaattttcacaagatctcaggaaaccatgtctctggtgctttagtttgaaaaactaacttcctaggtaaagaagcttctgtctaaccatgatgagctcatttcttctgcataccatgaagtttgagaccccattgtccagaatcatgaaaattttacactccagtttactgaaaatcttgactttgaatttaatattgattggcattgacaaaaatggttcattcttggatgtgtcctaagttgctcacccaacatatcagtggactgagaatcttccattagctccctctgtccatagcactgagtctattgacaatctttgcagtcctctatgaaggagagtcctgaggttcatcagattcttgtagacactcagatgaaccaaaggaattaacggaattgaggactgccagccatttccacaacactaggaataattaccatctaagtgtaaaggtctacatcattcagaataccctgcatgacaggctgatgcaaaaaaaaatccaaccctgcagaggcttcacagcaaccctcacagttccttcagggaagaaataatctccaagttcagtgagtcagtaaagctgttctgagctacagtaaacattggattgggcccagttttgtctgagttcaatgtgattgttatactcagctgctgatcctatatggactgagtatggataatttaaatgagcctggctgcgtggtttgttatatgaaaacctgaactaaatataaataaagggcatgtctggactagcatgagggtgagagattctgggagctccaccccccttactcttattgccctttcctccaggaacctccaggtcctcagggtgagaatccacacagatcccttcatggctctattgccaggagaccaaatctctgataaaatcactcagaccttcttcagacagacaacccagggaaagggcatttttacacccttatgtatgtggggaaaggtaatccatacccattagaagcccctgccagcagcctaactttatcatgaaaatgggtaaaattagccaataggggtacatttaagaaaattttcctgtgatgttccatccagaaaagagcaaaaatcagcttcacacctggagacttcctgtatcgggcacagcccagagaaagaagatcaccacagaattaaaatgcaactgtaagaacatgtaatgcttccgtgttccacacattatgtctcaccagtttagtcaatatggattaaatatgagagcgtggcaatgcacaaactctatctgaggaggaaagtcagagaaaaaatgttaaagaaaatatggcaatttgaagcctctgacaccagcaacttcagcaccaaggaaatgatttcaccctcattggcctcaaatttacttttcatggagcatcttcagggttccaaagtgagaccaggtgaattcaatgtgcatgcacttcccgggtgtccacttgtattttgtttactttacttctatttgcagaaagtaaacacatactcagccttagtgtcagtgtagggagtgctttccatgacatgaataccagaaaaaaaggaaaaacatggggccaattaatgtaaaaattagccactgtgtgtgtgtgtgtgtgtgtgtgtgtaggtgtgatttgaatactagagttggagtgggcttctatccacatgcacctgcacctgcaggtagtctcaggtgcaataatcaactgcctgaccctaaaggaaacaagaatctccccaaacccctgaagagtgtttgggtttaccgtgtgtccagtgattcagtgcctctagagctccaggaaggggctccccggtgatgcctgagatcttttcttcaggtctccctgcagagttctctgggtttcctaagggcaattcactatttcaaaagatggtgtgagaagcacatgctgtcattaaaggagaattctgagccacggcacagccactttatactgggctagagacactggtatgaatatactctgtaagtttagacagaaagcctcgtgcatggtaggggctgggctgcagggggtgctcaggataaacgcagcacagtctcccgccccagagcaggtgcacaggaggctggggaggggttcctctcagggcctgggacttcctttgaaaatatctaaaataagtatttcacaagggctgctgttgtttgtataaatatcctattcaattgtgagcatttatcaaactggatgttgtaatgacaaccacttttacaatggggatttcaaactcccctagatatcttaatagtaagcagctggaggtcaagaagagatcctttcttttaaataagtgcaatttttggagaaacatactaattcccaaaataacgcattcacatattaaggtctagaaatggctcaagttgtccctggtgcattcgaatgtgggttcaaagtgaggtgcgtgtcctgagggagcttgttctccagtggaggaagctctgtcaacacagagttcagggatgtgtaggggtcgcatcgcctctaacaggattacggcttgaaccctcagcatgtacaattgtgtcgtccatctgtcatgtatttgctctatctcatcctggctcaggaattgggctattcaatagcatccttcgtgaatatgcaaatcactaaggttaatacagatatctctgtgccgtgagagcatcacccaacaaccacacccctccttgggagaatcccctagatcacagctcctcaccatggactggacctggagcatcctcttcttggtggcagcagcaacaggtaagggactccccagtcccagggctgagggagaaaccaggccagtcatgtgagacttcacccactgctgtctcctctccacaggtgcccactcccgagtgcagctggtgcagtctgggcctgaggtgaagcagcctggggcctcggcgaaggtctcctgcaaggtgtctggttaaactgtcatcacctatggtatgaattggatacgacagaccccaggacaggggcttgagtggatgggatggatcatcctaccctggtgaacccaatgtatgcccacagattcacacacggtttgtcttctccatggacacctctgtcagcacggcggatctgcagactagctgcctaaagactgaggatgcagccatttattactgtgtgaggtacaccgtgtggaaacccacatcccgagagttttagaaaccctgaggaaggaggcagctgtgatgagctgaggcagtggtgcagcatgtctctaaacttccattttatctaagtttgcattgagttccgctttaatattagccaggaatgtgggatagacgggtgctcctaagaggtccttaatttgcccattttgatgggttttccagaagacgtgagaagccactttgttaacaaagcatcccaaagccatgccctgctccagaaacacgtgtacccatttcctggtctttggttaactgacaagctctcatcagcgcacctgggctaatttctcatcaggtagaaaaatgtgttgtaaagcaaggctaacgttgtgatagcaattcctgctcaataaccttcagcatcgttgttgttgtgttctatcaactaattacttgacttcaaggttctcattgggagtgtcttataaatttaagggatatatagaagttcccctaattaaaataaaacaattgtgagcacaacctcagtgttcaaccatgtctccacccttcccaccattcaccccaaagaaatgttcacctctcctggaagtcgggttcattttcaaattagttattttttattttactatatcaagattattgtatgtgactactgtagcagaaagtgaattaggggaacttgaagtaaccaacgaaagataaattcagaactaattaaacaagatgtcagaacgtgattggctctagtcttttaaaattcagcaggttatgtaaccaggctttaaatttacacatcttcctgttaccttcacggcacagtcaactcccattatgtaagaaatggcaactgcattcccaagcgtcatccaaaattgtaaaaatagactgggtgaggtgaggagttgattgtttaaattccgctctgaagaagcagcatcaactcaacaaaccaccgcttttccctcagtgactagagctatgtcgcaggccacatggacctaaatatccttgatagagataataggactacataaattgggctgatcatttttatgctgtaaaattaataggtgagtctgcactccagcctgggcaacaaaacaagtcttgcctgtaaatacaaaagaaagataaattaataggtactgactttgacatttcggataataatattttcataaaccgaatttaattatacccacattgttacctacaccttcactgaaaagttcctagttatcatgagttccatcaacactccacgtgttcaaatctggacatccaagagagtctggagaataaaatgcaatgagggcagtgaaacttgcatatattcagcacctcttaactcaggaggactcaatacaccctggaacactctgcttttctgaatggctcacaatgactccagctcactctccaacctcctcaaacatctggcttctgtttgccctaagttcacgctctgctcttagtctgtgctctgaagtctttgcaaaggtgaaaatgagctgtcagatggaacttccttctcacctcagcatggaatttactgtttcatttaatgaccactctttccataatggttgatttctttcagcctgttcattactggtgattttcaagggaatctctattgaatttttacatttttgcatttttgtctcggtgacaatgttgagaagtttttacctctagcatcataacatgatctagtgacctgacacatttgtggcaagcaatacctacaaattcagaagttctttggttactttccacaaaatataattatttctggtctgtgtatgagcatatcctagcaaccttgtactccacacaggtagatgtctacaagcctatgaattaatctctgtaaataaaaatttatctcaatttctttcaatgttcataattcttctgaggatgaggaagatctttctggatctattcagacaataggcccagagaccacctggtatgtaaggagctcacctggctcacctggttccccctgttgtctcacataaggtcagcccacttgttcaggtcctaagaagagagctcagttttatctgattttacaacactcccaatttctgctgactctcctgttacccacatccatggagatacattatttattatacaattaaccaaagtaatgtcaaaggcccaatgtgcaatattgcacatcctagggtatgttcatgcaattgaatcgaggagaaagtctttcagagacagatggatctgaactggtaaatatgtgtgtaaggactctgggcttaagtgtcattgtccagccatgtttcacaggtgtgacctgtcagggaagaaccagagttccttgtgttctcagaggggaggggtcccagaagtcctctctggttcccaggaaaggtaattgcattaatcttggtgatgagactatcatccagtgatgatgtactatagagtttatgtttgaagttgacactgctatcgcaatctacatcttttcacacagaagtgtttagaggtcaggccacatcttcaggatcccacattgagaaggacagagatatattccactaccttctcctgagatctcaggcagaaacccaaatttcaaaaggtctcagaagggcagctctcaggggctatttaaaaataacccacttcgtgggacagggagcatccttctaaccatgatggatgttctgaactacaataaacattgcatggatccagggtctgaattcactgtgattattacactccactgctgtttcaatgtgtctgaaggggtaaatgacaatttagatgacctgggtgtgtggtttgttttatataaatcttcaaggatagaacagcattgaacctattccaaaatctgtccctgatccaagatcacactgatctcccagaccagcatcttcagcacatttccctacctggaagaagaggactatgggcttggtaaggggaggccacaggaagagaactgagttctcagagggcacagccagcttcctactcccagggcgagcccaaaagactggggcctccctcctcccttttcacctgtccatacaaagtcaccgcccacatgcaaatcctcacttaggcacctacaggaaaccagcacacatttccttaaatttgggatccagctcacatgggaaatactttctgagactcatgggcctcctgcacaagaacatgaaacacctgtggttcttcctcctgctggtggcagctcccagatgtgagtgcctcagggatccagacctgaagatatgagatgctgcctctcatcccagggctcaccgtggttctctctgttcacaggggtcctgtcccaggtgcagctgcaggagtcgggcccaggactggtgaagccttcggagaccctgtccctcatctgcgctgtctctggtgactccatcagcagtggtaactggtgaatctgggtccgccagcccccagggaaggggctggagtggattggggaaatccatcatagtgggagcacctactacaacccgtccctcaagagtcgaatcaccatgtccgtagacacgtccaagaaccagttctacctgaagctgagctctgtgaccgccgcggacacggccgtgtattactgtgcgagatacacagtgaggggaggtgagtgtgagcccagacacaaacctccctacagataggcagagggggcgggcacaggtgctgctcaggaccaacagggggcgcgcgaggccacagagcccgaggccgggtcaggagcaggtgcagggagggcggggcttcctcatcagctcagtgatctccctcctcgccagcactcagatgtccccagggctcctgtttctttattgtctgtggttctgcttcctcacatccttgtggcagacaagaaaggaggaagacaatttttctgtttactgttgaggtttcaccaattactaggaactttcctacaagttcctgcgtgactcattttaccgtatatgtgtgtgtgtataaatatatacacatacacacacacaccatatatatacaccatatatattatatagatacacaccatatatattatatatatacacaccatatatattatatatacacaccatatatattatatatatacacacgatatatataatatatatatacacaccatatgtatattatatataaacacaccgtatatatatatggttctcaccatctcttgatttgtgtcatcaatggaattgtgcctatttgaaattcatttacccaaaccttaaatccaatggatctataccggaattttaatgatgtaattaaggttaaatgtggtcaaagtgtgagaccctaattcaataaaccagttgtctttataagaagaggaagagacacccgagacctctcacttttcgcgtgcacacagagaagaagccgtgaggagacgtagtgcactagaaggtggccctgtgcaagccaggaagaagccgcgctaagaaccaatttttacagctccttgatcttccacattcagactgcagaattgtaagaaaatcaatatttgttgtttaacccacccactcctgttgtcttcttatgaagatccaaacagactgataccacgtaattctgttagctctggttcgtggagggaggagcagccccctgaggctggacacttctctcagatttccacgtgaagtaggtaaaaatagtagctctcatataaaaatgtgtcatgaccctgttggccatttttgagcaaggtctctgaaaccagcccttgtgtgtgtgtcacaaatgttttcttttatcttttatttggacataacacatagacaaggggtaccagctggatggagactggtcactgcccatcttctgttgtctccttagtatgtcacagaaaaccacaccaacatcaccaacgtcactgtttttcttcaaccacctcaaaccgactatagaaatgatccctgcagtatagtctatttcttcaactttctaaatttgcactgaatctcttcctaaatggggagctacatggggtctgagttttgttcctttcttcccagtcttccccaagtgccaaggacagaatagacttaaaataaaatttggccgtcagtggccccaaccccacatcactttctaaaacccacatcctgcatccatccttctctggacacccctcatcgggctacctacgaatggccagaagctgccatcaccttctgggctgaggccacgagttatacacacgtgtgatttcagtcacacacactctactgcaggacacacctgtgttctgaggcactcaggcacctgctgatctcagtcattctctaataaattacacatctcttattaataaaggtccagatggtcccatcagctgcagagcagtggagtaaagctcatgggtgggtccgtcaggtagaagtcagacaatggatgggatggctggtcacttcccttttcactgatgtccccagtgaatattaatggaataaaaccatattaactacagagggacagaaaagaagactagctcatcaaggtatttaaggaccaggaactttatttggggggaaagtgaaagacacttttaaatggaaagccctaaagcacatacaacagctgagagagtggccactgtgcacatgaaggctgaggagacggatggcagcgtccgttcctccaagatgtccctgggtgtgtgatggttggactccttatgcatatgaatataagagctggactcagggagaaaaaagggccatatcccataggaaaggaagacaaaaaagcagatgggcatccctggagagagctcattagatttggtgtgtttaagacaaaaatttcttccaaaaattgtaatgttctaagctaaatatgaacctcttcaataaactgagaattaacaggagaatagagctatgagttgagagaagaaacaaatcatgagagagcagaaagcaaatccacaaaaaactgtcatatgacagaagtcagaatggagctggggcagctacttcattattctgaagacttgttgaccatgtggagaaggggcttgaacaaatggggacgttctccaaccttctgaatcagcctccttcttatgcatgagtaaaaatcatagttctgggggtgaccctcccaattttcctgtctgtacctcttcccccaggggtagagtgtcttcccaaccacaatggtttctcaccagtgtcctcagcttctcctccattgaacttaccctgcagattaagaatttcttctagatgtagttctttgggaattttctgttttctttagtttctgttgactccaccacaccccataggtcacaggtttgattggatttcccctggagacagtggaggtggatccaggcgttcaacagtcctcgctgttcctcccttcctgtcagcaccacaggacagcagataagggagttgactgtagatttttcgaattcttgggaaaatcctgcaaggactagtagattcacactccaataccattagcacatgcatccaaaaaaaatactcacgaaatatttccaggttagcctgttcctctctcaatgccatccagtggcacctgccctgggttcaccaacatgtgggccccactcctctctgctggcatctctctcctcacatttcagtcttctcgttagctctgtgaaagcaactcagatatgttaaaaggttttcttcttcatttattcagtttttcaggtttgttgttaatgaggtcagaataagaccatagttttctcatttttcacattcccacactgagtagccactttctatataaaagccagaaactaagggaacaaatcaaatatccatatccactacaggtgaacgttaaacaatttgacatatgattatgaactaaagtacaatgcagaattagaatcaaggcatcctcattctcataaaagcatgtctacattctcaaataactctgctgagtgaaagtagctgaagaattaagagtgcaattcataaacttctaattgtataaactgcaaaaggtccaactattctaaagtaacagagcagatttgaaatttgtgagaaacgggtgttgaaagtaattggctggtgagatgaaattacagagaagtgacagaaagatttaggggttaacttaattgtacacaacctgattaaagtttgcacacatacgttaccattttccaaattgtgcagtgtagatttgaattaattattaattgtacttaaaaaaagcagtaacaaataaacacatgaatatgtttactgaggaggaacaaaaaatagatgggtatgaacactggaaacatctcagactcttgaaagtacacaggcttgaacactggttctctccgtatacttccggtaaacggctgaatacactaaaagaaaacagagatgtcctggcaggggtggaatcctgcagacctcactaggtgtgtcccacactgccctggagttgtctcaggggagcagtctcctctagtggtcagaggcacaggctgagataatggggttaactctgtccagctgtgtgactttgaatgcattgtataaacactctgttctgtatgtaatttatcttccttaaaatgcaacattgacacttacattaaatgtattctacaaatatgtcaaaaagaagatgatgactgctaaatgattatcaaggcacaatcacataatataatgatattttcctgagtgataagatgactaccaatctcgggggcactttgtctgctctgagccctgcccctcctcaggattcccatcccagagcttgctatacagtaggagacatgcaaataggtttctccctctgctgatgaccagtcctgaccccatagctctgggagagaagcgccagccctgggattcccaggggtttccatttggtgatcaggactaaagacagaggacccaccatggagcttgggctgagctgggttttcactgttgctgttttaaaaggtgaactagagagattgagtgtgaatggatacacttgagagaaacagtggatatgtctggaactttctgaccaggacacctacaaagtttgcaggtgtccagtgtgaggtacagctggtggagtctgaagaaaaccaaagacaacttgacaacttgggggatccctgagactctcctgtgcagactctggattaaccttcagtagctactgaatgagctcagattcccaggctccagggaaggggctggagtgagtagtagatatatagtacgatagaagtcagatatgttatgcacaatctgtgaagagcagattcaccatctccaaagaaaatgccaagaactcactctgtttgcaaatgaacagtctgagagcagagggcacagctgtgtgttactgtatgtgaggcaccaggtaagaagacatcagtgtgaacacagacacagaatttcctgaaataagggaggagtctgggctaaaagggcactcaggacccacagaaaacaggggaagctctagggcaggtgcagatggtcatcatgggctgctttccttgagggtctgaggcttcctctgcatctaacagtttccctgggagcctctctacatttatgcttctgtggccacccctgaggtctctggacattctcatttgttgcaaaggcagatgtaagtattggaggcataaaaatgcacaggaggccagggagtctgtagacattgttaccccagaaggtcaatctcaccactagtgctggaggagggtgggagtttgatgaagctgccctaagtatcctgtggtctaagctaagtccaacgaggccatttgtgcctccctgagcacagttgtccatcagagatgtcccatgtgtcccagcagcagccatgtctcagtgtcttcactgtgcacagccattgtctgggaggagctcccaggatgggtgtctttggcacacaccaggtggcgggtgttagagtgcggtgcagcagctggctgcctgttctattgggctccctgatgctggagagatgggaggtgcattctcaggtccagcaccctgtttgtgaatttttatataaaaccatgattttacttcattttctcagatgacatagataattaggaacagaacctgcaaagaaattgtaattttcaactttaccccaaatttattgtttcttaattctgtgtaagatccagacatattattgccttcctcatgagaaattgttctatttaaaatgaaattagttttttctcacattctttgtttctgttcaagtacagagatctttattaaagtaagttgggttctttccacacactaaccctcacctcccccagagaaagagcagagattttcctcactctgagtctaagggaggagctgttcctgcacgactcagagcctgcagagacccccccccgccaggtgcagcttcagtgagtcaggtatttctccttgtgggtgacctccaccgccagtgattgctgctcaggtctaattgtgggttaagcattaggacacccttcaggtgatcacatctcagtcttattctgaaaatcaccatgaacagagatagttcaatgtctattctcctgacattagtttctctttattatttggttccaagtatggagaaaaatgtgacaataaatttgtcagaatctaacctcagtatccactgcattactctaggagactcacaaattgaacacaaatgagccctttattctcataaaagtgtatgtatttgggaatttcaatgtgttctccagaacctgtgcatgccaacaactgtgtttctcagtgcccacttggcctggtgaagccctcacagaccctctccctcacctgtgctgtctctggattccccatcacaaccagtgcttcctgctgtagctgcattcataaaccccccaggaagggactggagtgaatccggtgcacaggtcatgagggagtgcacattccaacccactcctcaagagtccagtcaccatctccagatccatgtccaaaaagcagttcttcctacagccgagctaagtgagccgcaagcacacagccatgtatttttaacaaaagacacagtaaggtaaccacagtgggaactcacacccaaacctccctgtgggggtgcacaggacagccacagttactcaggaccccaggattcctcaggacaccaaggggcactcaaggccattgtagatgccctcaggtagccaagggttctcaggaaacatggaggaaaaccaggaccccaaaaggtgctccgtacagcaggggactcaggacaattgtggggactcagagcaggctcaaagctcagcttcagggcaggtgcagctggggttgaaaggggctggatgaggggttttgtgacaccatcatatttcaccactagacacactccactttgtctattctaacgcatgagagtgtatgattagaaaatgatatttatataaatacataaccatagttagctgtgtcaagttgtcctcttgctaggtgtccatagctaggtgcatcagccttgtccataaggactaattccccgcaattactggagaatctcataaattgtggtcaattatgtcagattcctctctttttctgccttcctttctcccttcttctctctctctcacacagaaacttacatacacccaccccacaacacaccaaaatctataacttttattacctgatatattcaataaacctgattaatgtgcagcttttccagcttcgttatttatgctgttgtaacaataagaacaatgtgtttcctagctgtgtacttctctaagctgagtagcatctttgtttataatacctagaattaaaaacaacccaaaagtcaatcaccagcttaactggtaaacaaattgaggaaaagtcattcattgacatactatccactactaccatcaactaatgttgggtacactcaacagcatggttaaattcacaagtacttgtgatgagtaaaatgagccaaagtaacaaaagtgcatacataagatacaactttcataaattctatagaacaaaaagtaatctaaagttacataaaaatcagtagttcactgtgagtattgtaggagaggggaaggactaggaaggaggaattatagtacaagacaaaattttgagggaattgacttgttatctatgttgctagtgatgatgtctatgacccatttgtaaaattgaacacttcatatggagattattatttttaatttaactccattaatgacagtactaattatagtaggtataatttggtatcaaaagaattagacagagataaataaaatacatgaaaagtcagagactcttgaatatacacataaatgagccctgggcatctctgtatttttagagaaatgctagaatatagaaaaataatggcataattttatgtcactaaaaaagtttatcgaactccaccagtcatgtggtattagttcattttcacactggtataaagaactacctgagactgggtagtttacaaggaaaagagatttagttggctcaccgttcttcatggctggggaggccacaggaaacttacaatcatggtggaaggtgaaggggaaacaaggcacatctcccagggcagcaggagagagagagaggggggaagtgacacatacttttaaacaatcagtggttgttagaactcactcactaccatgagaacaacatggggaaactggacccatgatccaatcacctctcacctggtccctcccctgacatgtggggattacaatttgagatgatactttgatggggatacgaaatcaatctatatcacatgtccagctctgtcctggagttgtttcagggacccagggtgtccggctgatagaaccagtgacaccaagctcacaccctcagctgtagttgacaccacacaaagccaagagattacaactaagatttagtttgaatgtcgtgtctgatgaagtcacacactcagagaaagtgaatatggaaaagtttattatttgcactctataggtgtctggtgagtgcagggcaggtctcccaggaaaatctgaaacagcttgaaagaagaagaaaggagactggctcagcatttttatgatggtttggtcctgggggcagagtgaggcttcccactcacagaaaggggtttgcagggtttgaaactccccctggcatcgaatgaagaagctcctgtgatttcaaactagagccaccttgtgtggcaaaaaaggagatgatggaggaatatgctttaaatcatcagcagtcatgcacccaaaaatagtgtgacaacttattctatgcagcaggaataaaaataattaataagaaagaagataagggttcagtgtgggtggacaacacgcaggtctacagaaatgagatgactttagaaatataagcaaaggataatgaaaaaaaggaggggaaggggaattaaacagggtcctggtctgatgtcttgggtagaagcttctcacaatcaaggactaccagctcattctgcaggtcttaggtcagccatctgcttaaaaacatcagaaacgccagagaatctatgaacatgctcagtttaacatttcctatttgagtagctttacagttatgtgaaattcttaactggttcttgatttttcttttagatacaggctctcaccctgtcacacagtttaaagtgcagtggtgtgatcatagctcgctgtaattttgaactcctgactcatattcttcccatcttagcctcttgaatatctagaactagaggggcatgccactcatcccctccttattttttattttattttttcatataaataaggtctctttgtgttgcccaggctggttttgattgcctggtctcatgggatttccctcacttcccttctgaaagtggtgtgattatacagatgatccagtgcatctggcctgaatttattctttaattgtaaaatacgaacccaataattaactgcctgaatgttttctgcagtgagttagttaaaaggatctgacaagattccttccaatatgattcaagagcagtattgtccactgatgttccttccagtttccttgttgaagatcacaagagtctgtggaaaagaggtagtaaaaaggccgcctcaaactcttcgtggttggagtgggtaccacacatgcaagcagtaggacaaggatgatctctggggtaaagtctataaacatataggccttttagctgccaagtcatagggtaataactgatgcatcctgaggagtggaccatggtttcatagtgctagtgggagaacccttggccaagcaagttttacattttattaaagatttgataattttaatgtaaagaagacattttttaaacgttcccagaagattgtgagtggtattgattctgtctcgtatgaacaatgacagtgctctccacggttagattatgttataaactagaatgaggtagagtgtttggtgtattaaatcactatttttttagcttctatgttagttttttgtttgtgtgttagcatttgctttaaaattctattaatcagatctctagttggtagaaattcatctgaaagtttcttccattgttgtccattttgataggatttccagaagatgtaagaaccctctctgtttgcaaaaatattccaaagttgtgcaccatctagaaacatagttacttaattctaatttttaatttattaaaaagttgtgataagtgcaaagttttctgccttctgaattgatttcataacacacagaataatatatactaaatggaagtttgtactagtaatacaaattactggttcataacctctacttttattattgaggtattatccatcaatatataatcttaaatcaatgatctcagtgggaatcttacctaagtaatatacaaaatattttcctgatcttgacataaaatagatgtgaacacattcttcatattcagccatgtctcctgtctatcacattatgaaccacatgctaactttgatttacttgggacttgctctaatttcaaactagttattttttatcttcacgcagctggattattatgtgtggctattttaccagagtgataagatacaatactaacaattttcactgcaggcatgtctaggcaagcgccctgtgcacaatgaccttagtgggttggacattctatggggactctcccctgtctgcctaggagagttatctgcctcctccctctatcattttcctctttgaataagtgcatctaacccgttagaatacaaaggccaaccttaactgctcccagctgacaggggatgctgttttgggaagatctcccttgaggtctgtctaagggacccagtaaaagggagccattatcccaggcttcacttggatgaccatttggagttgatgcctgaaggtgagaagagacaaaccgggttattagaagacatgtatcaaaaccaaacaaggtggtaaggacagtttgaaaaaaaattccaaggctgctgacacacccagataactggtggctgtagttatgcctgctaagatttgggtgcatggggcttggctttcgttacctcccttggacttattttcccaaacaaagaaacctccgggttagggggaccctatttattccagtcacctggcatgatttgcaggataattgctcagaattaaaatattcgtccagatgtttatatagcccatgcctgtgtttcttctgagctgcagccagagatcattggttggttcacagcgataagcagagttagtctaaaatggaggcaaatacttaaaacttatttcttctctcagttaatggattctatagagaaaagtagctactcggcatgggaatgtaaaaaaatgagtaaactatgatcttattctgaactcattaacaacaaacctgaaaaaccaattgaagagactgtaatttaaagacaagtgtatgatatgttttgaaacataatttttctctctccagttctgatttttgtcagaaactaatcattataggactgagtgatttgcaaaataaactttagtcttatggttggtctgatcatttgcataaagcgaagccataataattaataataattctgtaggaaaagcctgcaagcacgaggagcttcacagtctaacactatgagcacatgcatcctccagcaactcactgaatattttcaagtcagctggttcttagcttaaataacatccagttggtatctgtcccaggaacactaatatatggttctctctgcaggcccctttctccacagattaagggtttttttttttctctgtaatatcaactcagatatgttgaatgctttttccttattagtggtttttcaggtttgttgttaatgatttcagaataagatcattgtttactcattttttttaaattcccgtgccgagtagctacttttctctatagaatccattaactgggagaaaaaataacattttcttatgggtgaacaattaaatagtttgacatatatttatgtactggtatataatgcagcttgaaatcaaggcatgcctcaatcataaaaatcatggctaaattctcaaagaattgtgctgagtgaaagaagctaaggaattaagagtaaattttatataattcattgtagaaatattagaagatgccactaccataaattaaaatgaagaagacttaaatttttctgagaaaatggtgttgggaatgatgcggatgtgatttaagtttcagaggaataagaaaaagatttagggattaatttaattattcaaaagttgattgaagtgccgagtgaatggctgcaaacatagctctacatttttcaaatcattccctataaatttgaattaattatttatttttatacttgaataaagcaataacaaagaaataaatgaatatttttgctaaaatggagcaataaaaagactgatattgacagaagaaatatgactgacttctgaaaatacacacacatgagccgtggttctctctacatatttagataaattacagaaagttgtcataactgatggggaatcctgcagacttcactaggcatagtccacactgccctggagttgtctcaggggagctgcctcctccagtggttagagcacaggcccaggtaataggactcatttttttagatgtgtaattttagacacactgcacaactgctgtgttctctgtgcaaattatctcctgtaaaatgtaacattgaaacctgccttaaatatattgtgtaaatatgtaaaaataaaatcagattgtgagagctaaatgctaatcaaggcgcaatcacgtaatatacaattatattttcctgaatgatggaattaataccaatctcccccaggacacttcatctgcacggagcccggcctctcctcagatgtcccaccccagagcttgctatatagtcggggacatgcaaatagggccctccctctgctgatgaaaaccagcccagctgaccctgcagctctgggagaggagcccagcactgggattccgaggtgtttccattcggtgatcagcactgaacacagaggactcaccatggagttttggctgagctgggttttccttgttgctatttcaaaaggtgattcatggagaactagagatatcgagtgtgagtgaacacgagtgagagaaacagtggatatgtgtggcagtttctaaccaatgtctctgtgtttgcaggtgtccagtgtgaggtgcagctggtggagactggaggaggcttgatccagcctggggggtccctgagactctcctgtgcagcctctgggttcaccgtcagtagcaactacatgagctgggtccgccaggctccagggaaggggctggagtgggtctcagttatttatagcggtggtagcacatactacgcagactccgtgaagggccgattcaccatctccagagacaattccaagaacacgctgtatcttcaaatgaacagcctgagagccgaggacacggccgtgtattactgtgcgagagacacagtgaggggaggccattgtgcgcccagacacaaacctccctgcaggaacgctggggaaatcagcggcagggggcgctcaggagccactgatcagagtcagccccggaggcaggtgcagatggaggctgatttcctgtcaggatgtgggactctgtcttcttctgacggttccccagggaacctctctaagtttagcattctgtgcctatgaacgtcttctctaagtatttgaaagagattattttaatatgaagagcagttctcactcgcacaaaatgtggattgatgcttactgggatgaaaagtcctcaaacatggtcaccacgatcagagtctgagtgagctcagggcttcctgctgagtctcctcctatcagaccaaggacagggacctcagtgaggttccccgtctagaacagtctttatggatactgattgtgggcggcaagccacccaggtgccgacgcaagagaccgaggacacgagctgttccagtacaataaaatataaaacaagaatagttataccagatatagatcttagatatgattatatatgaatatcattaatcattagttggtagcaattactctttattccaatattataataatcctcactctacaatcataacctaggaaaagccaggccatacagagataggagctgaggggacatagtgagaagtgaccagaagacaagagtgcgagccttctgttatgcctggacagggcgaccagagggctccttggtctagcagtaatgccagcatctgggaagacgcctgttgccaagcggaccatggtctagtggtagactcagtgtcaaggaaaaacacctgctacttagcagaccaggaaagggagtctccctttccccggggagtttagagaagactctgctcctccacctcctgtggagggcctgatatcagtcagacccgcccgcacttatccggaggcctaacagtctccctgtgatgctgtgcttcagtggccacactcctagtcctccttcgtgttccatcctgtacacctggctctgccttctagatagcagtagcaaatcagtgaaagtactaacagtctctgataagcagaaataatattgtaagctgtttctctccttctcctctctctctctgcctcagctgccaggcaggaaagggtcccctgtccagtggacacgtgacccatgtgaccttacctatcattggagatggctcacactccttaccctgtccctttgtcttatatccaattaatatcagcgcagcctggcattcagggccactactagtctccgcatcttggtggtagtggtcccccgggcccagctgtcttttcttttatctctttgtcttgtgtctttatttctatgctctctcgtctccgcacacggggagaaacccactgaccctgtggggctggtccctacactgatcacagacaatagagggtaggccaggatcagtgtcatgtaggacatcacaggtttcacctctgaaccttttcctgacactaaatatgcaaatcagcatcagcactgatctggtgattcttttgttcctaatccatttaattcctttttcagtcgttgttttcatttttccgtttgcttttcctgctttctgcaaaaggaagatttttccctgtggtcaaaattccggacctcaagccctttcctgacgctcaggtgggtctcaggctgtggctgctgcagtcacgcgggagaggctggtgggactttcttcactcctcgtcactcagggccctccactgtgttgcatggagacttatctggaaatgcaagttgcgactgagaactgaaggggacaagcttgtttggttaacatgggatgtggatgtgtttctaattttgttctgataaactttcacagagtaactttctgcactagtcatgtgaggaagaggatgtgaacgttgtcagaataaaaatagaacaacttgtgttataatctttacaggtgaagctggagaaggtcatgaatagagggttctcatgcacacatccctgataacaagaactaccataaaattactctgcacaaccacaactttcaacaaaggctaccacaacaataagagaattaatattgtgaggatatctgccctgcaactcccagtacaatcttaaactgattccacccttgttattaattcttctacccccaggataattgcctcagaacagctcatgtaagtcctctcatttatcctttaaaacaacctttaccaacctttactaacctgacttcctttacctacctaaatatgcccagggataatcccactggaatgctcattttcaaatacatattatttgattttggagaatttctttctgtctgatattcaggtgtgacaagctgtagagggtcacaccactttcctgtgagatgtaggggatgacaatttggggggatggctggaaacatccaatatcctcagggtcggccatcagtaagcgcaggctggaagtctcagaacgagttgaagctgcttaaccacggaattttaccttctccagatcagctttgatggaatcagggccaaactggttatcaatgataatctacctaacattgagtcaactgatcacagttttaataacctctattaaaaattcacaccaacacttggattagtgtctgatcaaataactacaaagtattttccagccaagtataccataaaacagaccattacccatggagaaaaacatttaacatgagttctaggtccttacattgttaaaggtgtaaaactgattatttttaaattatgctttttatttttgctattgagttgtagaagtttcatttacattttggatattaacgcttttttcagatacatgatatattatccaattctgtgagttggaattatttcattgctttgcagaatatttttttaatctagtccaacttgttcaattctgcttttttttaaatgtgctttgaatgtaaaatccagaaaaagattgctaatttttgaggattgggagttttacagttgcaggaatttcattgaaatatttaatgcatttaaagttaatttttgtgtttattctaacctaaaattcttaattcttcacatgtgaaaatccagttttcataacatgctctttggaagacaccataatttagccattgtatgttgatgtttctcatgctgaaaatcagttcgccatcaatatgtgggtttatatctaagctctctatatgcatttatgctgataccattcggatttattactctgtgtttgtaacaaatgttgaggactggaagtgaaatgcctcaagctttattcttgccttattacagatattagaccaaaatattctaaccttctactagtgagtataataatagctgtcgctttttttttttttttgattcagagtttcactcttgttgtgtaggctggagtgcagtggtgtgatctcagctcaccgcaacctctgcctcccgggttcaagcgattctcctgcctcggcctcccgagtagctgggattacaggcatgcaccaccacacccggctaattttgtattttcagtaaagatggggtttctccatgttggtcaggctggtcgcgaactccagacctcaggtgatcctcccgcctcagcctcccaaagtgctgggattacaagcatgagccactgcacccagcctcttcattttttttttattcatatgttcattcagcagccactatgtcttcccattgatttctttggtttcctctttactatctttttctttttagtaaagctgttactcctaagggaagatgggaggtgggcctggacagggatttggtgcattcctctcttcactcccagttcttattgatctctccagtgtctctagaacactggttttcctggcattaccgctgcagataatttctcttgcaatgtagtgctgatgaggaggtgtgtctggatgcatttcagctatagttgctgttttgcttaccctgacacaaccgtcccaaggggtagaggctggagcattttgtgatgtgtccccagtactgaagaaaaaggcttcaatagcaggaggaattcctcaactgtatacactctgagaatttaaacaataacttctctatcacactcaaatttaaaccatccaatgaatatgtctactttaatcgtaacttaaatgatatttggcagcctctgtcccagaaaagattatcgtctgctcctgtttatttccctgcaagtctttatctctcttcagatttcagatatcttgtttgtcttataacatcaaaaatctgatgaatttaagaaaatgtgctaatttgcagatcagtaagctttagtagttgtgagaataataacaaatttttatgggatgcctacatctccaagctgagtagcatctttatttctaacactcagaaactagaaacaatgcaaatatcaagaagatatatagataaagagtaatggcatgctaatttacggtaatcatagccatcactagaatcaatacactgttgatgctcaatgtggttgaatcacaagtagttataatgagtgagaagccacacacataaaacacatactatataattcctgtataataaattcttgaaactcaaaaccaaagtattcaatatgaaggattgactcagaatatggcaagggaaaaaaataattgggaaggaggaattgtagagtaacacaaggaaacttttaagtgtaatttatttgttcgttatctggatggtttttggggatgcacaggtgagcacgagtggaattacattttgttgtgtttgtttttttctgaagagatgtggtcctactctgtgacccaggcaggactgcagtggtgggatcatagttcaatgtagcttccaacttctggtcaccaacgatcctcctgcatctgccatctaagtagctgaaactacagttgtgtgccaccaggctcagcttgagtacttattaaatcaaacactttatgcaatatttaatgtatggcaataatgtctcattgagagtattacaaataaatgaatggataatttgttcagtacagattgatggaaaatagacactaacatgaggaatgtctgacatttatgaacatacaactgcataaaatgtgttctcttacattcattaggtaaacacaatagtgcatacacatcaaaccatgctttcattacaggaaggaagttctgaaaatgtcactgggggtgacccacgctgtgctgggcttggttcgggggcagtcaggcccggtggtgagaagcacaggcccagatacccaggcttactctgcaaatgtgagctctggggacattgtaccacccatctgtgcttctgctggtaattttccatctgtaacgtggaaataacattgatactacataccgtgatttctccacatatgtaaaaataaaataagatgattgctgctaagtttaaataagggcagttttcataggtccattgtacctcaataaaattactttaaaataaaaattacaaatacagttgtaggtttaaagagtttatcacagaacaaacttataataagaaactatattttcaaaaattgtatcaatatctctaaactcccccaggacacactcacctgctctgggctctccactctcctcaggattcccaccccagagcttgctatatagtaggagacatgcaaacagagccaaacctctgctgatgaaaagcagcccagccctgaccctgcagctctgggagaggagccccagctccaggattcccaggtctttccatttagtcttcagggctgagcacagaggactcaccatggagtctgggctgagctgggttttccttgttgctattttgaaaggtgattcatggggaatgagttgaatgtaagtgaatatgagtgagagaaacagtggatgtgtgcggcagtttctgaccagggtgtctctgtgtttgcaggtgtccagtgtgaggtgcagctggtggagtctgggtgaggcttggtacagcctggagggtccctgagactctcctgtgcagcctctggattcaccttcagtagctcctggatgcactgggtctgccaggctccggagaaggggctggagtgggtggccgacataaagtgtgacggaagtgagaaatactatgtagactctgtgaagggccgattgaccatctccagagacaatgccaagaactccctctatctgcaagtgaacagcctgagagctgaggacatgaccgtgtattactgtgtgagaggcacagtgaggggaggtcagtgtgagcccagacacaaacctcctgcaggggcatctggagccacaagggggcgctcaggatacacagaggacaggggcagccccagggcaggtgcaggtggaggtcaagggctgctctccttcagggtctgtggcttcctctcatctaacagttccgcagggagcctcttgtatttacagtgatgtgctactgaggtttctaagtttgtaaagtttattactacaggaggaaccactatcaaacgcccttaaggcaggtgtcactaatggagaaaggaaagtgcacaggaggctgggtgaggctgtggacactgtctgcctatgattcaagtttcacaagcagtgacggagaaatgggagtttgatggagctccctaactaccatgtggtctaaactaagtccaactaagtccctgagctctgggtgcccatcagggatccgccatgtgcccggcagccgcgtgcctttttgtctcctctgcgcccaatcactgtctgtgatgagcttccaggatgtgtgtgtttggcacaaaccaggtgatggacgtcagacagcagcagctggtgcccggatcatgggctccctaatgctggaggaatgagaggtgcattctcagggacaagacattgttgatggatttttatgtagaaaccacgattttacttgcttctctcaggagacatagaagaagcaaccatgcagtcagcaaataattataatttccacaattaccccaaatggttaatccttaattctgcgcagggtcccaccgtagagtcacctttctcatgaggaatggttgaatctagaatgagtccacatgattttcatatttttggcttctgtccatgttcagagagttagagtagagtaagtttggacctttccacacactaagcctcacctcccccacagaaagagcagagacttcaactattcctgagtgtggggtaggggctggtcctgcacacctcagagcctgcagagactgccacgtgcagtgttatagacttgggtgttttctcattcaggaggggtgacctccacggcctccgatttctgctaagatataactgtgagtgcagaattaggacactattaggctatcatgcctcacttctattctgaaaatcaccctctttatagtaaaagaaaacaattcaatgtccatgcccctgaaagtcatttctttttaatttggttgcgagtttaccacatagtgcctgaatttattctcagaatctactgaattgtttataaatctcacaaattgaacaaaagtgaattcttcattcttactaaaatgtgtgtatgtaggaatttcagtgtgttttccagaagccatgcacaccaaccactgtgtttcatggtcatttattggcctggtgaggccctcacagaccccctccctcacctgtgctgtctctggattctccatcacaactagtgcttcctgctggagctggatccgccagtcctcagtcaagggagtggatcagggcataggtcacgagggagcacaaattctaacccactcctcatgagctcagtcaccatctccagatccacgtccaagaaccaaattttcttttagctgagttctgtgaccaacaatgccacaaccttgtattactgtgagaggaacagaagagatgtcagtgtgatcccagacacaaacttccctggagaggggcccaggaccaccaaagagcactcaggctccatgaaaacagggcccaagctggagaacgggtttcctgtcaccctcacgtttcaccattagatactctacactatgcctatgctgaggtgtgtgtttaatataattagaaaatggtatttatatacgtgtataatcatatctagtgtaagaatttgtagtttccaccttatgtgaccattaaagacaacatctctcacgttattcaaggaccttataaagtataatacttttacataagatttatctccttttttgtttctccttctgtctatattctctctgtctctctcttcctccctctttctctctctctctccatctctctctctctgtctctctctcacacacaaatacacacacatgcaatcgttgacagtatataggctaattaagaatatattcccatatgatttaaaaataacagttttacaaatatttgcctttaatttttcaaagaaaattaaatccaaatgccagtgattttttatgtgacttttaaaatttaaattgttaatttttgttttcatcaatgcttgtatgtgtgcttttgtattctttcagattatttggtgccttcacagaattaaacatgtgaaactctccacttgaatttctgtgactcaggactggtgagcaaaaagttagaagtcactctcctgatccttccctacagctgcagattcctgaaggtaatgacctcacagtagaccaaggccctcaaaggtgaccttgagttccagcacatcttgggaggccaagcggatgtttgtgaaagaaatagtggctatgtgacagtttctaaccagaatatctctgtgttttcaggtatccagggtgaggcccagcttacagagtctgggggagacttggtacacttagaggggcccctgaggctctcctgtgcagcctcttggttcaccttcagtatctatgagattcactgggtttgccaggcctcagggaaggggctggaatgggttgcagttatatggcgtggtgaaagtcatcaatacaatgcagactatgttaggggcagactcaccacttccagagacaacaccaagtacatgctgtacatgcaaatgatcagcctgagaacccagaacatggcagcatttaactgtgcaggaaacatcgtgatgggaagtccacgtgggctcagagacagactgccatgcaggacacagggggtggcttggctgaagggggcactcagcacccacagaagacaggagcagcccagggcaggggcaggtggagttcaagggctgctttcctgtcaggttctgtggcttcttctgcatcaaatgcgttctcctgggagcctctctatatttatggttctctgcctaccactgaggcctctggattggaaaagattactactagaaaaaaaaattctcatatacccctgaagaatacatcattaattgaggcagaagatgtcacaggaggccagggaggctgtggaaactgtgcgacgtggatgcacatctgacaacaaagacataaaaaatcagggaacactgataaaacctcctaattatgccatggccctctctaagcctagtaaagccattgatgccttcctgggccaaacccacccatcagggatcactcctgtgtcccagcagcagacatgccttagaatctccactgtatgtaatcactgtctgggaggagctcccagggcatgtgtctttgcattaaccaggtgatgggtgtcagagaacagcagctggatgcctggtctatgggttccctgatgttgaagaaatgggaggtgcagtctcagagccaatacactgtttatgcatttttatatagaaaccatgatttttcttgcttctctcagatgacacagaggatcaagaaaacagtctgtaaacaattgtaatgtccccatttcttctgaataaatgcattatttcttaattctgagtgggggtttgtcagaccatgcccttctcctaagcaattgttcaatccaggctgaaaccacatggggatcacatactttggtttggttcaggtgcagaggtcttcagtagagcaaatttggtccttcccacacagtaagcctcaccttcctcagagaaagagctgaaattgatccaactttgtctgaggtgggagctgcttctccacaccttggagcttgcagagacccctaaatgcagctttattgagtcaggtgtgtctccatgtgggggacttctgctgctagtgatctctgctcagttctaaatgtgggttcagaattaggacacttaggttatcacgcctcaaaaattaccatcattgtagatagaaataatagtacaatgccaattgttgtcacttgtttcttattattattggagtataagtttgaagagacaaattgttaccatatatttgcataaatctaatgtcagaatctcttgaattgctcttgaacacttacaaactggttagaagcagattcttatttttttctatactagtgtattttgggatgtcaacattttgtccagaacatgtgagtaccaataactgtgtgtttcagaaatgactgtgagattcagtcatttctatcgagtgggaaaaccagttaactttgtctttgatatatggatggaagcccaagatagaggcttgtcagtcattgtttctgtgccttctcccttgggaatgtctgtatttttttatgctctgtcctgggtctataccccaatggttcccctactccatggcacctgcctgtgcctgtgcatgcccctgcccacactctccgtgaaacatctgctttggctcaggaagaacccctcctctgccttttttcctcctgcccctggtccacattcttctccatccacaggctctcagcagcacctcccatccacactaaccctacatggggtcataccttgtccaccacttcctctctcttttcttctgagctttgccttttattccaacagcctgtttccatctcacctggacttgtgtacaggaaaggatttaccgagcagtcttgggttgtgcaaaccctgaacattcctgaaaaagtgctttctcaagctaggcccatattcagctcctgggagatgatatctgcctttttggcatactcctcctggtagtattattaaaccacttgattaagataaggtttacatctgtaaaactacacattatttaacatacttaactcattgagtttggagtaagtatacatctgcaaagttatccccatcatcaaggtcataaccatagaaatcacttccaaaacattcctcttatctctcttaatattgtgattattttattagttaaaatgtatttttgtttgtgtttgtctgtgtctctgtgtgtgtagcctgggtgcacgctatactagctgttttcataatgacttatggtgaatgcctattagtgctcaagaggccggcgtctgagcactggaggtcaattgtgcaggtgtcacacacatctgtgatgggcccaataaacagccctgggcacaagcactcaggtgagcttccctggtggacaatgcttcacacatgttgtcatgcatcactgctgggagaactggggacaagagactcctcagggaaagaacacctgggagctcatgcctggattctcagggccttctccctggtgcctttgctcattttaattcatattcattcgctataataaagctgcacccatgagaataacagcttttcttgtgtcctttatttgtactgattaaggggcctgaggatggtcttgggacactcaacacaattacatcagagttggagaatgctagaaagttcctgattgctgacgcatggctagaggattttttataacatcaaaggatgagaaagtgcgggataaaagacattcaatgcccagatggctacagaatcatatggcatgagatggcatgtacactccaataaggagcaggaagtgaaagtaatccatggaatttagaaacaacagatacagcttcctaggagttgttccctgaaaaaggaaaagtaaaaataatgaggaacaacccgaatatgcaattcatatctgtgatagctaaaataatagtaaaaagatgcacatccagccctgcagtgtgccctgtgagccgaggctgctagactcccattcaccaccaaagggtacagttgtccagaaacaacacacaacacataagagtgacacagaaggtagcccagagtttgggctggggagaggaatccactagacaactataacaaggaggacagcatggaaagtggcatcattttgtgatatgattgatatcattaatttatatcatcggattgtgaacaaagttagccaatggactatgagagtgactgacgtagcagcttctctggcttcgtgtgctgcagatgagaggagaatgtttgggaggatgctggacccacagctcacaacagacatatgacagacgtagctgatcccaacctcaagtaggatgttcttgatgagacagcttccctggtgcactggatatcagatcctgtatagtttcagaacttgtgtagtttgtgttgctttggctttttctctggatcttttaggtgctaatgaaatgagagtgcttcacaaaaaaatggggcagacaaaggggatagttaagggcctcctccaagcaatgtggatatcataaaataaatgttaaaaaatgaaagaactaaacaagaaggtgctggggttgacacaaaggacttaaaacagcactaccaggagttgggtgcagcaatgggcatcccttcaggtccatcagcaagtcagagacctaaacaaatattccctattcatgttgaattggcagagtgtaaaaatctagaagacaaaatggccaggaaaaatgtgcgattttgcatgggtgaaggtctggcaagttaatcatcttgaggactgttgaggtcctgaggtggtcctgcccttgcttgatgcccaggccgtagtccaactcacacgaaattgccagggaatagacagtagtttttttagtagttcttgttatcaggcataagtgcatttgaattttctcttcatggcctttcctggcactatttctcattttttttaacacacatagtttcaactagatttatcaccttcacagggtcacagagaagggtggaagaagggaggccctgtatgggtctcgaagaaacatggaaaagagtggagagggacaatagcagggtgtaaggaattattgagaccttactctgcccctcccaggaggctcaggccagcctttttctgcatttgaggttctgggttataaacgctgtagactcctcccttcagggcagggtgacaactatgcaaatgcaagtgggggcctccccacttaaacccagggctcccctccacagtgagtctccctcactgcccagctgggatctcagggcttcattttctgtcctccaccatcatggggtcaaccgccatcctcgccctcctcctggctgttctccaaggtcagtcctgccgagggcttgaggtcacagaggagaacgggtggaaaggagcccctgattcaaattttgtgtctcccccacaggagtctgtgccgaggtgcagctggtgcagtctggagcagaggtgaaaaagcccggggagtctctgaagatctcctgtaagggttctggatacagctttaccagctactggatcggctgggtgcgccagatgcccgggaaaggcctggagtggatggggatcatctatcctggtgactctgataccagatacagcccgtccttccaaggccaggtcaccatctcagccgacaagtccatcagcaccgcctacctgcagtggagcagcctgaaggcctcggacaccgccatgtattactgtgcgagacacacagtgagagaaaccagccccgagcccgtctaaaaccctccacaccgcaggtgcagaatgagctgctagagactcactccccaggggcctctctattcatccggggaggaaacactggctgtttgtgtcctcaggagcaagaaccagagaacaatgtgggagggttcccagcccctaaggcaactgtataggggacctgaccatgggaggtggattctctgacggggctcttgtgtgttctacaaggttgttcatggtgtatattagatggttaacatcaaaaggctgcctaacaggcacctctccaatatgacagtattttaattagtgaaaattttacacagttcatcattgcttgcttgccttcctccctcctgtccactctcactcactccttcttttattttctacttaattttacaaaatcatttaacccctttttgaactattaataggttatctttgtttggtgattgttttcctttcaataatatgtactgaataattcatctttgtgccaattcataagtattctggtgtaataaagacttctttcataaaaattggataaattaaaataaagataaatttttaaaaacatacgatctatcaaaactgaaccataaagaaataaaaactctgggttgggtgtgtttgctcattcctgtaatcccagcactttgggaggccatggccggtggatcacctgaggtcaggagttcgatatcggtctggcaaacgtggagaaacgctgtctccactaaaaatacaaaaattagctggacatggtggtgctcgcctgtagtcccagatacttgggagcctaaggccagagaagagattgaacccgggaggcagaggttgaaataagccgaaatctagccactgcattccagactgggcaacagagtgagactccatcccgaaaaaaaaaactgaacagacctatgagtaaagagattgagtcagtgatttttcaaacatctcaaatcaaagaaaagtcaagaacttcatggcttcactactgaattttatcaaaaatttaaaaaaaaactagaatctctatacaaatttccaacaaaataaagaggaaaaaatacatgcaagcttattttggaaggtcctatttccaaagcaaggaaaagacactccaaataaataaaattacaggctaatatccctgattatctagtttcaaaaactctcaagggtggtgagaaaccaaattcaacagcacattaacaacagaattcaccatgatcaggtgtggtttatctctaggaagcaatgaagtttcaacctgcagaaataaatgtgatatatcaaatgaaaatattgaaggactaaaaccatatgcaccatatgtccatgtcaatagatgcagaaagagcctctgtcgaaatccactacactctaatttttaaaaatctgaacatattatgcataaaacatatatacctcaacataataaagaccacatatcacaagcccacatctaacatcatacacagtgatgaaaattttattttcctctaagactagaaactagacaagatgcttcactatcaccaatattattaaacacagcactgggtggtctagacaaaacaggccagaagaaaaaaatagaagtcatccatatagtaatgaataaatataaaatatatttttacatattacatgctcttatttatacaaagccttaaacactccaccaaaaaagattgaaactaatgaagaaattcaataaagttgcagaatccaaaatcaaacttacatttcaagatggcaggttagaggcattgctagtatacctcttccacttggaaggacaaactgatgtggagagatgaacatcgcggacttattttcaagaagcaatgcaggaactgaacagaaacactgaaataatctacaaactttctgaaaaagcaggaagctgcagcctacactgtgagtcaggtgaagggctgggagtccccagcatttgagggagaacagccaaaaatttcagccagtggtcccaagttgaaagtagctctcaacaggggtgtgtaatataacctagggttgggacgaactcccttggccagggcctgggtagggaagtgttaaaagtgggctctgcaagtttaggagccatgggtgcaggagctggtgccctgctttgcagcagacaggaaggggcatggcatgaaacccatggctgcagtctccatggggacagcctatgactcctggcatttgcaggtattgatcacagattgactgaaactcatctcactgctgccagtggaacaccacgggagtggatcagcctcaccaagtatgtgggaactgtgtggggcctaccaccacctgccactccccaccccctgcccaaacttctgtgcagcagaggcagccatggtcccatctggaacatcatcccagtggcctgagaaccacccctgtcccccacacccacaggggctgctgcttgccctgcatacagagactcagagcggaaacccacctggcccaaccctcaccttgctttgtgcagccacctgccctggcagcttaacacaaaagacagcatcttttgggagctacatagccacacccactgcctaagaatccatagtagcccccatacctgggcaacacaaggcttgcaaaaatcccaccgctaataatgcagctggtgctcttttgcaagcaccacctcttagctggaggccaaccaaccatgcattacagcatctcctagtagactaacactgcatcctggaaggagaaaatgactgtgcgatctcagttatcaccatggcctgcaccactttggatgaccaggagatcctgagtctctccatgtgaccagttcattgctactataaccatcattcaagaaagccagtacacaaaggctatcaatatccatggaatttcacagagtctccttcactctcctgcctgccactcccatcagacccggttctgctgctcactgttgaaaaatatgaggacagttcacatcactggatcacttagagacatttgcccacaccagcctgaagtgtgtcaacgtcactgggcagctagacctagagaagaaacataactcacagtaccatggctcccaggttctcctcctcttaggggaagggagtgcaccacattgagggaacacctcatgggacaagagaatctggatggcaggccttggacaccagatccctccactggtgggaaacttcttctagcagaagtacagttgcagcactgggctcagctgggaaagtcttcagctctttctcaacagacagccctgttgcttgtgaagaatcttgaagaagaggaagcctttcccccttgtacaccactgtaggcacacttggggtctctcccacaagacctcagcatgggtgcaactatagacagcctttctggaacacatcattgtgactgcatcccccagaaacagcactttctggattcaggcttgcatgagacagagagtcacagttcctctctatttggcacatgaacatttgtacagatgaaaaaacatgcctgtcttatctgaatagccggaatactgggacagcagtatgtctgagaggtggataaatttcctactgacttgacaagagagctgaggtggttccaacccttcccaccgataagacctcagtgggactcactaaaacctctttcagccaactctgtcaaggctgggacttaatttacccacctgctttagccacaactagtttctacccaaggaaaagtcctccactgatgtgaagcttgagccatcaagcaaataaataaatcactggggacaaataaaataaacatgtgcatgccacagaggaatgagataaggtttaagagacctctaccattctaaccccatagaagacagtgaacttgctcacagaccgagcagatttctactgcaatcaacacataggaaagccatcatacaaagattctccataaccccggaactcttacagagtcttcacccctctaaggaccaaaaaccaaatcaggttgtaattaattataagcattaaagtctcattcttaagggaaaaaaatccatttaaaaacaaacacaagaaacagtcaaatcaaacataaattcaataataattagaaaatctaccaaaatgagaggaaatgagaaaaataactggggaaaaatgagaaaacagggtgctgtgccagtgccaaaaggtcacaaggtcacactacctctccagcaataaaccataacaaaaatggagtctttgaaatatcagaaaagaaaatcagaatgttgattgataagctactcaagaagatatcagaaaaaggcaaaaatcataataaataaatttataaaactgttgagaatatgaatacaaatttttacagagagatagacatcctaaagagaaaccaatcagaactcctgaaaatttaaaaaaatgcagggaattggaaagggaattacaaaatgccatggaaagtttgaaaaatagactagaaaaaagtagcagaaataacaatagactagaaacagtacaaaataaaagtagaagtaaaatattcgaggaaaaagaaaaaggaaacagttaaagaaaaaagtagaaagaccagactattattgaaataaccaaatcagagaaaaataaatttaaaaagagccaaaagaagtgaaaaaagtctccaggaaatatgggattatgtaaaacaaacaaatttaagaataattggtgctcctgaagaagaaaaaataataataagtttggaaaacttctctgaaggaataattgagaactacttctctggcctgactaaagacctagatatccaaatccaaaaagttcaaggaactcctggggaattcattgcaaaaataccttcaccaagcatacagtcatcaggctacctaaagtctacatgaaggaaataattctaagagcagtaaaacgaagaaacccatcagaataatggcagacgtctcagcagaaacttgacaagcaagacagattagggttctattttcaaactccttaaacagaaaaactttcaaccaagaattcttttttatcccgccaaactgttttataaataaaaaagaaataaagtcattttcagaaaaacaaatgctgagggaattcatcactatcaaaccagcactacaagaaatgctagaataagttctaaaccttgaaacaaaaggccaatatgcacaaaaatggaacctcttaaaaattaaaaactcacggggcctataaaacaataacacaatatcaaagaataaacaaaattaggtaatgacatgacaaagagaatagcaactcatatctaaatattcacattgaatgtaaatcataaaaggcatggaagaaggaatttcacaaaaatagaaaccaggagtgagcaggactagctatttttgatctcagacaaaacaggacttcaaagcaaaaacaatttaaaaagacatagatgatcactatacaatgataaaaggatcaattcaacaaaaaattacaattacatatttatatgcaccaaacactggaggaactagattcattaaacaagtactgctagacctaaaaaactgagagagttagcaaaacaatcataatgggagattttagtacaatcatgacagtactaaacagatcttcgagacaaaaagtcaacagataaacaatgcacctaaatgactcactggaacaaatggatgcagcagatatttacagaacattctatccaagatctgcagaatatacattcttctaatcagcacatgcaacattctccaaggtagagcatatactaggccacaaaacaagtctcaataaatttttaaaacaatgaaatcatatcaagtatcttctcagaccacagcagaataaaactaaaaatcatctcgctaaagaactgtcgaaaatgaacaaatacatagaaattaagaaatttgcttctgaataatatctgggttaacagttacatcaagatgaaaatttaaaaattatcttaattaaattataataatgagacaagttattgaaacctcaaaaataaaggaaaagcagtgataagaggaaagtttatagtgccagctgcctgcatcaaaaagtctgaaagagcacaaattcacaacctaatgtcacaccttgagaaattggagaaacaagaacaaactaaacatagagccagaagaagaaaagaaataacaaagatcagagcagaactaaatgcaatccaaacaaaaaaaagcaatgaaacaaacagttggttatttgaaaaaataaacaaattcatgggtcattagctagattaacaaagaaaagaatatcaaagatccaaataagctcagaaatgaaacgagacattacaatctacaccactaatataaaaaataatttgagactactaagttcaccttcatgtgcacaatgtagaagacttagaggaaatggaaaaatttctagaaacatacaacactcctagattaaataaaaaagaaacagttactttgaatagacaaataacaaacagtgagattgaatcagtaattcaagaattgccaacaataacaacaatgaaatagggccaggtgaattcacagctgaattctatcaaaaaatttaaagaagaattgctgccaattttgctgcaactattttttaaatttagataaaaaagaatcctccctaaattattctatgaagctagtataaccaagataccaaaaccaggaaaacacacacacacagacacacacacactctacagatgaatttccctgataaatatagatgcaaaaatagcaaaaaaaaaaatagctagttgagttcaacagcacatcaaaaagataattcctcatgatcaagcgtgtttcatctcagaattgcagggattatttgaacatactcaagtcaataaatgtaatacatcacataaacagaattacaaataaaaaccttacgattgtctcaatagatgcagaaaaagcattcaacaaaattcagcattttttaatgataaaaactgtaaataaatgaggcatagaagaaacctgcctcaaactaataaaagttacatatgaaaaatccacagctaatatcatgctgaatgtgaaaaagttaaaagcatttaccctgagaacacaaacaatacaaggatgcccaagttcaccaattctattcaacatagttctggaagttctagccagagcaattagtcaggagaaaaaaaataagggtatccaaatttaaaaagagaacgtcagactatcactgtttacagatcaagggattatatatattaaaaccctagactcctccaaaatactaatagttttagtaaatgaattcagttaagtctcagattacaaaatacatgtacacaaattagtagcacggctatatatcaacaacagcaatgctgagagttaaatcaagaactccatcccttttacagaagctgcgaaaagatagtatatttaccaatatacttaaccaaaagggtaaaagatctcaacaaggagaactacacaacactgctgaaagaaatcatagatgatacaaacaaatgcaaatgcatcccctgatcatggattgcaagaatcgctattgtgaaaatgaccataatgcctaaagcaatctacagaatcaatgaaattcttattaaaataccaacattattttctacagaattcaaaaataataacgctgaaatttatttgaaaccaaaaaaaagccaaaatacccaaagaaatcctaataagataaagaaaattggagccatcacattactgaacttcatattacaccacaaggctgcagttaccaaaacaacatggcactgacataatagtaggctcatagaccactggaacaaaatagagaacccagaaataaagccacatatgtaaatccaactgatgctttgcaaaatgtaccaaattttaaattgaaaaatagacaccacatttaacaaatggtacaagaaaaactagcaagccacatgtaaaagaataaaactggatttctatctgtcaccatataaaagaccaactcaagatgaatcaggtactgaaatataagacattaaactcaaaaattctagaaaacaatattggaaaaacacttttagacatcagggtaggcaaagaatttataactaagaccccaaaagcaaatgcagcaaaaacaaaactaaatttatggaacccatttaaactaaagtgtttcttcacagcacaactaagagtcaatggagtaaaaagacaactcacagaacgggagaaaatatgtgcaaacttcacatctgacaaaaaattggtatattcagaatctacaaaatactaaaacaagtcgccaagaaaaaacaaacgatcccatttgaaagtggacaagggacataaatagatagttctcagaagaagatatacaaatggccaacaaacatatgaaaaactgtgtaacatcactaatcatcaggaaaatacaaattaaaaccacaatctaataacacctaatcctgcaagaatggccactataaaaagtcaaaaaacaaaagggaatgcttatacactgttgatgaaaatgtaatttagtataaccactatggaaaacactattgagatttcttgaaaagcagaaaggtagatctactattttttttttcttttttgagatggagtctctctcagtcacccaggctggagtgcagtggtgcaatctcatctcattgcaacctccgcctcccgtgtcaagtgatgctcccacctcagcctccagagtatctgggattacaggcacccaccatcatgcctggctaattgttttttgaatttttgtagagaaggggtttccccatgttggccaggctggtctccaactcctgacctcagctgatcctccccgctcggcagcccaaattactgaaattacaggcgtgcagcatcacacctggccagatctactgtttgatccagcaatctcattactggagagctacccaaaggaaataaagtcattatatgaaaaagacgtgtatatgtatgtttatagcagcagaattcaaaattgaaaatatgtgaaaccaatttaaatgcccattggccaatgagttcagaaagaaaatgtgacatcgcctgtaatcccagcatttcgggaggccgaagagggcggatcacgagctcaggagatcgacaccatcctggccaacatggtgaaatcccgtctctactaaaaatacaaaaaatttgccggacctgttggcgtgcacctggagtcccagctactcgggaggctgaggcaggagaattgcttgaacccgggaggcagaggctgcagtgaaccgagattgcagcactgcactccagcctgggtgacagagcaagactctgcctcaaaaaaaaaaaaaaaaaagaaaagaaaagaaaagaaaaagaaaatttgacatatatacatcatggaatactaccaagccgttaaagggaatggcataatgtcctttgcagcaacttggatgaagctggaggtaatgagtataagtgaagttacacaggagtagaaaagcaaaaactgtgtttgcacacttacaagtgggagatgggctatgaactggcaaaggcatacagagtgatataagggactttggagactcagaagggaaagaataggatggatactagagagaaaataactacactttaggtagagtgtacactattcaggtgatgaatgtactaaaatctcagaatttattgctatataattcctccatctaacaaaaaaatatttacccccaaagctattgaaattaaacaaaaatcaacctacaaaaataagcatcttctgtatacactaaaaaatgattattcaaaattaaaatcaagaaaataaatctaaatacaacagcttaaaattcataaaataaattttaccaaaataaatttaacaaggatacaaaatatctgcacattgaaaattataatatattgattaaaatgtaagaaaacacaaataaatggaaggctatcttgtgttcttgtgttactggaacatacattgttaatatgtccatcctaacctaagcatttacagattcaatgcaatcccattcaaaatttcaaagatatgcatttacataaattgaaaaaaaaaacctctctcatttgaatggctggggtgattgacccggactatcaatttgaaatcagactactactccacaatggaggtgagacagagtatgtctggaatacaggagatttcttaggacatctcttagtattactttgccatgggattaagatcaatgggaaaaaacaacctaattcaggcaggaatacaaatggcccagatacttcagaaataaaagtttgggtcttcacccagattaaaaatcctgaccagccaaggtacttgctgaaggcaaaacaaatacagaatgggtagtggaagaaggtagttgtcaataccaggaatgaccacacgaccagaagtggggaccgtaattgtcgtgagtatctccttaagctgataagcaacttcagcaaagtctcaggatattttctccatatcttgttaggaatatatttctgcatgtgtataactgtactaagaaaatatcttcattgtgccggacacggtggctcacacctgtaatcccagcaatttaggaagccaaggtgggtggattacctgaggtctagaggtcgagaccagcttgaccagtatggtgaaaccccgtctctaccaaaaatacaaaaattagcctggcatggtggcaggtgcctgtaatcccaggcttctcagaaggctgagacaggagaatagcttgaaccctgaacccgcgaggcagaggtggcagtgagccaagattgcaccactgcactccagcctgggcaacagactgagactccatctaaaaaacaaacaaacaaacaaaaatatattaattgttttcattgaatttgttttctttttatcatgtgtcacaagatttattgacttcctaacagcatttaaatgttgttaactatatgtagtggtatgtatgtaggttaaggattagtgcactttcagttgtatgaaggatagctgtattatgttaggcataattatgaccttattattgtctttatttggagatcaagcatgattgcagctagatgtgtaggggtgctaagttgacaagaggtgggcttttgatgcttgatactaggtgtcaacttgattggattaaaggatgcctacatggctgggaaagtattgtttcttggtgtgtctctgggggttttgccagaggaggctgacatttgagtcaatggactggaaatttgagtttgtcatgttgcatgatccttttaaagtcttatagaacttagttgactattattttggtgtagttcatttgtataaatatttctttgaagtttaattttcttcctttgtgtttgtctgtcactggcaacacggtaattgtagccttttagaaatagcttagaaggttggcgactcatcattttttaaaaaagttagagaacagttggcatgacttttttaaattctgagagccattttttatctaacatataggctatcatgaagaatatttatagtgtgcttgagaagcatgcgtattacactgcgcttggttggaatgttctgtagatgtctattaggtcagtttgttcaatagtgttgtttaagtccatgggcttcctaagaatttttttatggatgttctatacattattgagggtgaggtgttgaagtctcctcctttcttattgttttctatttctcacttcatatctcttaaactcttgttaatgcggttatatttctatttttataactatgtaaaatagaaataaaataataattgcttagtaattttaatgggaaaatcacataataagaaattatattttcccaaatgctgccatcaccactaaactcctccaggagtctcacatctgctctgggctctgctctctcctaaggggtcccacatcagagtttgctacagaggaggagacaagaaaatagggccctccctctcctgatgaaaaccagccctgccctgaccctgcaactctgggagaagatctctagtccagaattaccaggagtttggatttgatgatcagctctgtacaaacatggctcaccatagagttagggctgagctgggtttcccttgtcattattttaaaaggcgaataatggagaacttgagatatggagtgtgagtggatatgagtgaaaaaacagtgattctgtgtggcaggttctgactcagatgtctctgtgcttgtaggtgtctagtgtggggtgcagatggtggagtcttggggagagttggcacaagctgaatgtgcctgagactctgccgtgcatcctctgaatccaccttctgtagctactagatcagctgaatctgccaggctccaggaaaggggctgcagtgagtagtagatataatgtacgatggaagtcagacataatatgcagactctgtgaaggtcagattcaccatctccaaagacaatgccaagcacaggttgtatctgcaaatgaacagtctgagagctgagaatatggctctgtattattgagtcaaaggtaccaaatgaagggacatcagtgtgaacccagacacaaaatttcctgcagggaggagggaggaggctgggctgcagtgggcactcagcacacacaaaaggcagggacagttccaggggcaggtacaggtgcaggtgaaggcaaaggtctactttccttccagatctgtggattcctctgcatccaacagttcgcctgggcctctgtctttatggatctgcgcctaccactgatgtctctgggttagtaaagtttgctactataggaggaaacattgtcatttgtcagaaaggcgaataatggagaacaaaagatattgagtgtgagtggatatgagtgaaaaaacagtgattatgtgtggcaggttctgaccaaaatgtctctgtgtttgtaagtgtctagtgtgaggtgcaggtggtggagtgtaggggagaggcaagaggcagaaaagcgcgcaggaggccgggtgaggctgtagacattgtcagctcactatgccaatctcacaacagtgctggagaaggtgggagtctgatggagcttcccaacaaccctgtggtctaagctaagtccatcaaggccgctggttcctcctggaacacagctgtccatcaggaatcccccatgtgcccagcagcagccacgcgttagcatcttcactgtgcacagtcattgtttgggaggagctccaggatgggtctctttgtcaaaaaccgggtgatggtgtcagagagctgtgccgggtgcctggtccaggggctccctgacgttggaggtataggaggtgcgttctcagggtgggaacaccttttatggaaatgtacagaagaaaacatgattttccttggtcctctcagatgacatggagaagcaagcgcgcagcttgcaaacaattgtaatgtccttgtaatttcctactttatcccaagttcattgattcttgtaaaccttggtttctgtccaagtacagagatattgattagagtgagtttggttctttccacacactaaccctcacctcccccagataaagagcacattgtccttactctgagtctgagggaggagctgttcctgtacaactaagggcctgcagagacccccgtgtacagctttgcagagtcagatctttccacatgtgaggcgacctccacggcccatgattgctgctcaggtctaattgtggattcaggattaggacatcctttaggctatcacaggtcaatcagattctgaaaaatcactgttatcatagacagaggtaataattcaatacccactcccctgacagcagattctctttcttatttggttgaaagtttgaagaaaataagtgaccatttattattcttattctaactttagtatccactatttgttctaggggattcacaaatttcaaaacactgagctcttcattctcatgaaaatgtgcatatttgtgaatttcaacgtgttgttcagaacctgtgcatgccgacatctgtatttctcgtgcgttcttggcctggcgaagccctcacagaccctctccctcatctgtgctgtctctgcttctccatcacaaccagtgcttcctgctggagctggatccctcagctccccagggaagggactggagtgaatcaggtgcacaggtcatgagggagaacacaacgcaacccacgcctcaagagtccagtcaccatctccagatccacatccaaaacacagtttcttctacagctgagctacctgagcaacgagtacacaaccatgaatttttacacaaaagatacagcaaggggaagtcattgtgagcccagaaacaaacctccctgcagggaagctcaggaactgcgggaggccctcgggacaccagggggcgctcaggacacacatcaaggcaggtgcaagaggaaaaggtgctggagatggggtttggcatcatcatcatatttcactgacacccgccactgtgtttattctcatgtacgtgattctttgtattattagaaaatggcgtttatgtaaataaataaccatatgtaggtgcatcaagtcgtcctctcccttttttttttttttttttttttttgagtcctgctctgtcacccaggctggagtgcagtggcgcgatctcggctcactccaacctccgcctcccgagttcaagcgattctcctgactcagcctcccgagtagctggaattacaggtgtgcaccaccgcgcctggctaagttttgtatttttagtagagaccggatttcgccatattggccaggctggcctcaaactcatgatctcagttgatccgcccgccttggcctcccacagtgctgggattacaggtgtgagccaccgcgcccggcccgtcctctccatcttatgtggaacttttccattaagactctgagtccctggatttatttgagaacctcataaatcatggtcaattatgtctctttctcctctttctcccttcttcactcctctctagctcacaaactgaaacacacacagaattttctaacttcaattacctgatgtgttgaagacaattgattaaagcgcagcttttccagttcagccactgttcatattgttgtaagaataagaacgttgtgtttctcagctgcgtgcttctctaagatgagtagcagcttttttttaataatacccagaggctgaaagcaatctgaataccaatcatcagcttaatcagtaaacacaaggtggtaaattcgctcactggaaaaacaccgactgttacaatcaggtaaggctggatactctcaacagcaagtgtaaattcacaagtatatatgcttattaaaataagacaaacaaatacaagtacatacatactgttccacttttacaaattctataaaatgaatgctaatctaaagttacataaagaaaaccagtagttgactctggacctggtgtgaggagggaagggttaggaaccagaaattgtaggaaatgaagaagaaatgctgacggtagtggagttttttctatgttgatgaaggtaatagttatgtcactattaatcaaatcgtacacattgtgggatgcctattatttgtgaatttcaccctattaaaatattacaagttaaaacaagtataattttgtagaaaattagttagacatagatgaataaaatgtatgataaataaaaaaagaaaatcacagaacaatagcataaggacttcactcatcaaactgaagaaattttaaatttctcaacacagaattaaagatttaattagatatacataagaaatcaaagactcccggatatacacacgaataaaccctaagtccacctgtatttttagggaaacgctagaatacaagaaaataatgtcatgatttcattacataatgggggttaatgaaaccacatcaggcatgtccagctgtgtcctggggttggttcagggaacgggtgtgtcctgtggttaggagacgtggcaacaagctcacagcatcagttctagctgacaccataaaaaggccaagagatcacaattaaaatgtcatgtggatgtcacatctgtgggtgccacacactcccccatgtgaatacggaaaggttaattacactcttcaggtgtctgctgagagtacagctggtctctcaggaatgtccaaaatggctcgatagagcaagaaaggagactggctcagggttcctgtagtggcttggtggtgtgggcagagtgagggttctcactcaagaaaggagtttgtggcgtttgaacatctacatggcttcaaatagggtaactcctgtgattcctaactagattcacctcgtgtgggaaagaaaggagatgatgaaggaatgagccttaagctatcagcagtcagatatcaaaacaatagtctgatgacttattctatgtagcacctataaaaatcgttctggtcacggtggcctaagtctgtcatcccagcatttggggaggctgaggcaggtggatcatgaggtcaggagttcaagaccagcctggccaatatggtgaaaccccgtctctactaaaaatatttaaaaaaaaaatagttgggttgtggtggtgggcgcctgtaatcccagctactcaggaggctgaggcaggagaatagcttaatcccagggggcgtaggttgtagtgagctgagatcacaccactgcactgcagcctgggtgacagagcaagactccatctcaaaaaaaaaaaaaagagtaaaaaaatatcagcccaagatgggtggacaacaaccaggcctacaaaaaaggagaagactgcttataagaataagcaaatcataatgaaaattaggaggaaaacaaggagagtgaggtgaaaggcatggggcaggggattagacaagggtcctgttccaatgtcttgtgtggagacttttcactatctaaaatcatccacctattctgaatgtcttaggtgaactgtctgctccaaaacatcagaaccaccagaggatttttgaggatactcagtttaatatcttatatttgaggtgccttacaactgtgtaaaatgcttagttattatcagtataattagagatagggcctcactgtgtcacacaggttggagtgcagtggcacaatcatagctcactgttaccctgaacttctggctcacataatccttctgtctcagcctcctgagtagcatggactagagaggtgcaccaccacacacagctgatttaaaaaaaattgtttcatagaaatggggtctctctatgttgcccaggctggtcttgaactcctggtctcacgtgattcccctggttttgtttctaaaaatggtggaattaaaggcatgagccaccatgtctgctcagaaatgattatttggttgcaaaatattaacccaagaattgactccctgaattttctctgcagcgttttggttaataatgtctgataagatttatttcaatagtttcaacagcagagtgttctcctgatgtttcttccaatagtgataatttcatggttgaagatcacaaaatactattaaaagatgacataaaaaggcaaccttaaacttttggtgatggagtgagtataatacaaaaattacgttcaatattgtgtaacacacgcctgcagtaggaggaaggtgagcaatgagggtaaaatttctaaatgtatgaatcttccagctcccaagtcacagggcagtaactgatgagtcctgagagagggaacgtaatgccgtagtgcttgtgggataactcttggccaagagagtttccatattttattaaagtggttataatttttaaatttaaagatgccattttttcaacatatccagaatattgtgagtgggattgattctgtatgatacgaacaatggcaatgccttctgtttggataatattacaaaccaggttaagactgagtgtttggtgtaatgatgcaccagaacattattctagcttccatactagattttgtttttctctttgtttgcattagtttcaaatttatatgtaaggtctctagaatgtaggagtttatttgaaagtgtcttttcttgttggccattttgatggggcttccaggagatttaaaaacctcctctgcctgcagcacagtttaaaattctgcactacagtagaacatctgtatttaatcctggtctttggttaattgacaagctctagtaagtgcaataacttctgccttctgggctgattttatatcaggtagaggaatatatcctaaatgaaaatttgcactagtaatatatattattaattaataaccactacttttattatttaagtgttattaatcaagaactaatgttaaatcaagggtctcaatgggaatattacctaagggatacacaagatattttgctaatctagataaaatagatgtgaacactctcgtagtatccagccatgtctcctgtctgtcactttgttaaccacacagtaaattcacttggcacttgttctaattatctaattagtcacttacttatctcaaagcctccggattattatgtgtgactatttcagcagagagtgaagaaagacaacccaggctgaccaaacaatgaggaaaatcacaacctgatgaaacaggaagcctggatgtgagtggctccaggattgaataatttgacagctcatgtgcccaggctgtttcttgtctcaattttccacactgatacatccagaaaggcagcttcaccccccaggggactcctatcatgctgtgacatggtgacaacattcccaaggctcacacacatatgttaaatattggctggaaaaggggcagagacatttctggaattctcttctgaaggaccatgaatgcctcaaccaaccatctcccctgcctccatgaccagaaatgcaccacgtgcccacacggatattcatccctgatggggataagactccattgatgaggctgactattttatcatataaaattactaaagactgatttcagggtttcaaaaactaattgaactctgttgttctatgtccaccagagattacaaatcttccaatgatgccttctttgttttttgtctgcttgactttgtctcttcaacttgttctgtaccccagagaatctctttcagctccctcaggtgcattcaattgttttatttaactgacaatttctaaatcggttaaagacattaggctaaagactccatattcctaggtccatattcctttttccatattcctaggaaggcattgtgacccagagtctgggcatgaccttgtgagtgttcctgaccctcctccatatgagatgctggtctgggtgttcttgcccctttccctggggtagagtcctcctgttttccccaggtgctccctcccacagctctagtgttctcagtcagtgtcatcaccttccagatcttctgccctgccctgcagactaaggctctgattccataagcaagataggggagctgctcctcaatagatctttggtgaggatctctgttcccatctcaattcctgtagggttgaaccagtgttcctaggattctggtttcagtagcttgtccctgcagagtaaattcttagttctgtagggggattaagggagttgggtctgaatacattttagatgtcgaggatcttgttctctcccagaaagacacttcgggaaagtaagactttagtaactgtcccctttcttggggaaagggattcaagaggataggttgcttttgggcatgtggtcccttaaaatttcacactaaaaagcgtttcccacactcaatttcaagcagcccaatatatatttgtattttttcttggaacagacaatattttatattccagactctgccttaggtaatttcaaaccctggctttgttactctctacaagaaattgcttctccataagcttcagatttgttgtgtgttttgaaattttatcagaaatattaaagaaaattggcaaaattccatcctccatgtttatctgttattgttgatgcagttgtaaaaaataagaaaaatacattccttttttctgtacatttccaagcttagtagcaaatttttagtaacacccagaataataaaaaattcaaatattgtttagctgcttaataggaaaacaaattatagtaaatttgtttgctagaatgctacccagcatttataataagtaaacatttgatatacccaactacaaggtaaaatatccatttatgctaactaaaataagccaaacaaatgagaatgtatactatgttatttcatttttataaattctgaaaaattaaaatgaatttgcagcaatgtaaagatcagtagttgccagggaaatggtagaagaaagaaaggaaaaggagaaagaatacagaagaacaaaaggaaatgttaagaattctcttgtccaacttgataaggatgacggttacatcatttttatcaactgtaatctttaaatatgtgaaagtttattatctgtaaactaaacttataaactttattacaagcaaaaattgaaagttagacaagaaggagtgatagaaagagaaaatgtatattaaatttcagaaatatttaagaatgtatctgcctgaaccctagttctcaccatatctttaggtgaatgctaaaatgcagcaaaatcacgcatgttctcactacagaaagtgggttctacaaaccacactcggcacatttagctttgtcctggagttggttcagggagttattggggccagtgatgaggagcacaggccaagataccagcgatcacttatcccaaacatgagctctaacatacacacttagtcccttttccgtgtgtggtttacttccacatctgtacatggagagaccactgactgacaaaatataatttatacaaatatgtaaaattaaatagggtgatcagttcaaggtgtttatcacagcataattttacaataagacagcatatttcccaaataccatcattgtcaccaaactccttcaaggcacagtcatcttatctgggccccgtcctctcctcaggtgtcccaccccagagcttggtatatagtaggagacatgcaaataaggccctccctctgctgatgaaaatgagcccagccctgaccctgcagctctgggagaggagccccagccgtgagattcccaggagtttccacttggtgatcagcactgaacacagaccaccaaccatggagtttgggcttagctgggttttccttgttgctattttaaaaggtaattcatggtgtactagagatactgagtgtgaggggacatgagtggtagaaacagtggatatgtgtggcagtttctgaccttggtgtttctgtgtttgcaggtgtccaatgtgaggtgcagctggtggagtctgggggaggcttggtacagccagggcggtccctgagactctcctgtacagcttctggattcacctttggtgattatgctatgagctgggtccgccaggctccagggaaggggctggagtgggtaggtttcattagaagcaaagcttatggtgggacaacagaatacgccgcgtctgtgaaaggcagattcaccatctcaagagatgattccaaaagcatcgcctatctgcaaatgaacagcctgaaaaccgaggacacagccgtgtattactgtactagagacacagtgaggggaggtcagtgtgagcccagacacaaacctccctgcaggggcgcacagagccaccagggggcgctagggaccgactgagtacgggacaggtcccaggagcaggtgcagggggaggtttcctttttccttggctggaaaagtcacctttatcttcccaggactcgagccttctaggctgtgatattttattacttgtatttactgttcatttattatcattagtttttaaattttggtaatttttacaactctatggatatatttttaagtgtatactttcaagaaataaacattcctaattatttgcactgattctcccagagttttattaacatttgttgacatcagcaactacatagctatagggacaaacacttttaacgatagacagttgtttaggcctgaaaccccgtttatactaaaaatttacaaaaattagcctggcgtggtgaggggcgcctgtaatcccagctactcgggaggctgagcaaggagaattgcttgaatccgggaagcggaagtcacagtgagtggagtggactgccactacactccagcctggcgacagagcgagactttgtatgaaagaaagaaaagaaaaggaagaaaggaagaaaggaaggaaggaaggaaggaaggaaggaaggaaggaaggaaggaaggaaggaaaagagagaaagaaagagagaggaaggaaggaaggaaggaaggaaggaaggaaggaaaagagagaaagaaagagagaggaaggaaggaaggaagaaaggaaggaaggaagaaaagaaggaaagaaagaaaaaagatatataaacacgcagacctatgcatataaccatagggatttatattaaacattacaataaaataattctaaaaatgtgtcctaaggaatcaaacataatgatgaagtaaatataaatgttagagtaatttataattgatttgttatttttaatcgtttacttgaatttatttctatttgttcatttaaaagtagtatattggtcatttcaagagagctaacagtaaatttcagatgttgttgttacgatatatgataagaatttgaggtggtgaatgataattatcttatttctcaattatcttagttattccatattgtattcacaaatcataacattgcttcttaccttataaatataaacaaccataatttgtgaaattacaataattttctttattttaattttttaatttatcccagatcattatctttttcttcgcttccagatctcactggatcatctcgagggcccatcctcacccctgtctcccgaagacttctggagaggctgcaggacgggcagaaggaggagccccgtgtgagtccacacgacctggagcctccctctccttggattaggccatctcctcgggatcacagggctcttcattatccttaccccgctgttgtaccaaacaagcaacatcacacttcaattcatcagggtttgctttaattttctaaatcatcgtgaaggtgataattttaacagtaacgtatcacaaccaaataggataagcccttttccatggaacagggtttcttatcaggatatacatgtattatggattctcaatttatttgtagatgagatgctattatctccatattgtagatgattctgctaagtcatctcttaaaattaatttttccaaagactcaaacaaataaatgatataattacaaatttcaggtgtaatagctgagccaacattgagattatattaacatttagaacatgaacttgcaaatattgttattttcctgtcagctgtccccaattgtgattttatacagaatattagaaatttatcctgataaatcaggttaaaatattatatcactagtttattaacttttataactaataatataaaatgttccacatattttttagccatgttttacttacccgtgatatgtgtatttattaatttttcattttaagatgccacctttatctttcttatttctgggattttattctagtagatagagctgaatgcattttaataattatcataataatcacatttacattttgcattttaattttcatatacattttattaatattttaatttcaatataaaatattttcctacaaatgtcaatttttgatttttatgagataaaattaacctatacaaaatacatatattttcaatgtacagtttgagggtttctggcaaatgtgcacacatttgtctccagcatctaagttatgatgaggagcaggtccatctccacaacaagtgtcctcttcggtgcttccagtcagctctcacataaggaattttttttcaaatttaatatagatacagagggtaaatgtttggatttgtcacgggggattattgagtgatgctgaggtttggaatacagattccaccatcctctccctccactctccagcagtccacagtgtctatcattctcataattatgtccatgtgtgctcaatgctgaggtcttacttaggagaatatgtggtattcagttttctgctcctacattaatttgtttaggattaagggccccagcttctttcattttactgcaaaggacatgatttcattctttttcatggctgtgtagtattatacattgtagatgtaccgcattttgtatattcagtctaccaatgatgtgcatctggtttgatctatgtcgttgccactgtgaatagcacagcaatgaacatagatgtgtatgtgtctttttggtagaattatttgcttacttttcagtgtataccccgtggtgggactgctgcgtaaaatgatatctctgttttaagttctttgagaaatctccagtctgatttccaaaatggaaacaccaatttatattcccctcatcagtgtatgtgttctcttttctccacagtcccagcagcatccattgttttttgactttttagtgataaccattctgagtggtgcatggctgcacacctacagtcatctcatctttgataaggctgatgaaaacaagcaatgaggaagggactccctgttcaataaatggtgctgggacaactggctaggcatatgatgaagattgaagctggatatctactttcaacatgtataaaattaacacaaaattcattaaagttttaaatgtaagacctcaaaccataaaaatccttgaagacaacctaggaaatactcttcttgacatcaggtttgacaaaaaaatgttggctgagtatccaaaaccaattgcaacaaaaagaaaaatagacaagtggggcctaattaactgaggagctcctgctcagcaaaacaaacaaagaagcaaacaaaactaacagcacagtactcagacaacctacagaatgtggaaagatattcacaaacgttccatccaacaaagccgtaatatccagaatctatagggaaattaaacaaatcaagaagcaaaaaataataataataataaccccattaaaaatgggctgatacggtttgctgtgtccccacccaaatatcaacttgaattgtatctcccagaattcccatgtgttgtgagacggacccagggggaggtaattgaaccatgggggcctgtctttcccgtgctattctcttggtagtgaataagtctcaccagatctaatgagacttatcaggggtttatctgatgggtttatcaggggtttccgcttttgcttcttcctctttttctcttgccatcaccaggtaaggagtgccttttacctgccaccgtgttttggaggccttcacagccatgtggaactgtaattccaattaaacctctttttgttcccagttttgggtgtgtctttgttagcagtttgaaaatggactaatgcgtgggcaaatgacacagacacttctcaaaggaatacatacaagtgaccagcaaatatatttttaaaatgtttaacatcactaatcatcagagaaatgtaaatagaaaaatgttctgatttctgtcactataggtccattttcttgttttgaatttcatatacatggaataaaatattatagctcatttttgtaagaagcttttactatctgtgaggttcattcatgtgatagcatctatcaaggttttgtcaacatatgtataaatatgtatgtactcatacacatatagatatttcatatctgaatcagtccattgcattaataaatgacagattattaaataaatcagttcattaagggaataagtgacaatatgtatatctattttcctgttgatggaatttaaatttgtttccaatataaatatcataaacaaaactgtcatacatatctttgtacaagttcttctgtttatattcacacatttttattgataaaatatgttgaaatataagtatgcattataccttttcagctttatggagctatcactgacaaataaaattttctgtatttaaggtacaccaattgatgtattgatattcttggggaaatgctcataatgatcaaggtaattggcatgcctatcatctcagagagttaacattttatgcctttaatttattgtgtatgtgtgatgaaatcacctaatatctacttgtctggcaaaagatatgtttataatgcaacattcattagtatagtcacattgctgtaggtttgatctccagaactatttcaacctgtgtattagtccattctcaccctaatgtaaggaactacctgagactgggaaatttatgaagaaaagtggtttagttgactcacagttctgcaggcttaacagcaagtattactaggaggtatcaggaaacttacagtcatcacagaaagtgaaggggaagcaaggaccgcttcacatgctggcaggagagagagaaagagcaaggggagatgcaccacccttttaaaccttgagatcttgtgagaactctgtcacaagaacagcaaaagggaagaccgcccgcatgatccaatcactccccatcagacacctgctacaacacttggggattaaaatttgacatgagatgtgggtgaaaacacagagccaaaccatatcattccacccatggtctatcagaaatctcatgtccttctcacattgcaaaatatcattatgccttctcaacagtcttccaggcttaactcatttcagcattatcacaaaaatctatagtctaaagtcacctctgagacaaggtaaatttcttccccctataaacctgtaaaattaaaaagaagttagttatttccaagacacaatggaggtgcatgtactgggtaaatgctcccattccaaatgggtgtcattggccacagaaaaggggctacaggccccatgcaagtccaaacaccagtagggcagccattaaatgttaaagctacagcataatttccttttaccccatgtctcacatccaggacacactgatacaagggttgggctcccaaggccttaggaagctccaccctgtggctcaacgtggtacagtccccatgactgctttgataggctggcattgagtttctatggctttacaggcacagcatgcaagctgttggtggatctaccattccggggtctggaggaaggtgcccctcttctcacagatccactaggcatctagtgcctagtgcccagtgggtactctgtgtgggagatccaacaccacattttccttccacactggcctagtagaggtactccattagggctcagccctgcataagacttctgcctgaatacccagacattttcatacgtcatctgaaatctaagaggaagctcccaaacctcaactcttgccttatgtgcacccgcagactcaacaccacgtggaagcaaccaaagcttagggcttgcaccctctgaagcaatggcctgagctggaccttggcccctttagccatggctggcaggagagggacagggatgtcccaaggctgcacagagcagtcgggtcctgggcctggaccatgaaaccatttttctctactgggcttctgggcctgtgatgggagggaccgcagcaaagatctctgaaatgctctcaagatgtttttcccatcgggttcctcattacttatgcaaatttctgcagcccgcttgaatttcttcccaggaaatggattcttcttgtctaccacatggtcaggctgcaatttttttcaaccttttatgatctgcttcccttttaaacataagttcaaatttcagaccatctcttaatgaatgcatatgacttacattttcagaaacagccagggcaaatattgaatgctttgctacttagaaattttttctgctagataccttaagtcatctctccctagttcaacattgcacagatctctagggcaggggcaaaatgccactagtctttttgctaaagcatagcaagtgtgagctttactccagttcacaagaagttcttcatcttagcatctgagaccacctcagcctggactttattgtccatatcactatctgcattttgttcaaaaccattcagtaagcctctagaaagtttcaaacttttccacagcttcctgtcttcttgtgagccctccaagctttaccagcctctgtccattacccagttacaaagtcacttccacagttttaggtatcttaatagcagtgcccactcctagtgcaaattttctgtattagttgattcttacactgctgtaaagaactacctgagactgggtaatttatgaagaaaagagtttagtagactcacagttcttcaggctaaacaggaagcattactgggaggcatcaagacacacaatgatggccgaaggtgaaggggattcaaaaatcttctttgcaagatggcaggagagagacagcaagggagacgggaggtgccacacttttaaaccatcagatctcttgagaactttatcaggagaacagcaaagaggaaggccaccccattacccaatcactttatattaggcccttccttcaacatgtagggattacaatttggcctgagatttgagtgggaacacagagccaaactgtatcaacctgcataactgaaagttataacctttgaccaacatcagccaattttttcctcctcccagcccctgggaactactattctactttgcttccaagagcatgaatattttagattctacatataaatgagttcatgcaacatttgactctctgtgtctcactccacttagcaaagtgttctctatgtgttgtacatgttagaatttcctcgtttttaaaggcagaataatattcacttttaggtaggaataagccacattttatctgttgattcatagatggacattgacctattttctatatctaggctattatgaataatctcacaataaacatatatttgtcacactcactttattttctctagatgtatactcagaagtgggtatattctatgttcaattcattgagtaatcttgatgctgttttttcataatggctgtactaatttgcattttgttccaaaccatacatggataactttgtaccacatattcaggtctttgtttaagtcttaaatccatttttagctgatttatatgtattgtgtgagataaggtccattttttttcttccgcatatggatgcccagttttcacagcacttgttgaagagactgttttttctctattgtgtgttcttggcagttcatcaaagatcagtttattgggaagaaattggtggacttccagattgtctgtaatgttctgttggattctatgtctgtttaaatgtcagcattatactgttttgatttacatagatttgattttgaaattatagaatatgatatattcagttatattttacccaaaattattttggctatttaaagcttttgtatttttacataaattggagaactttttaatatttttgtaaaaccatgccatggagattatatatttattttataggcatataatagatatacctaatttatgggaacatgtaatatattgatgcatttataaacgtgtaaagatcagatcaggattggtatatctatcacattaaacgtgtatattttctttatgctaggcacatttgaacaactctcttctggctattttaacgtatacattagattatcgttaactatagtcaccttactcatctatcaaacatttaggttgtatttctcctatataactgtatatctgtcttcagtaatcatcctctctttatcctcttctctcttgtatccaaccaggcttctggtaaacaacaatctactctctgtcttcaggaaatccaatgttttagttgtgacataaaagtaagaagatgcaatatttgtctttctgtgtttggtttatttaacttaacattatggcttccacttccattcatattgttgcaaatgacaagatatcaacatttatggctgaataatattctattgcctacatcgattatatttttatatccatttctccacctacagacactgaggttgctttcatatctgggctattgtgaatagagctgcaagaacatggagtgcacatgcctttatgaggcagtgattttatcttctttagaacatactcagaataggatttgctgagtcatcaggtatttctatttttcttttattttggagtcttcatacaactttgcacaatagtggaaatacaaacggaaaaaccattataaaaagcagtttcagttttgaggtatgatccaaaaacacacaacatttcatcatgattctcattgggagtctctaatgaatctggtggaaaggcaggaagttttctaaccttgttaagaaaattatgagtttgcacatttttctttttgaggctggaaattggcatgattcaagatgcgtaatgttagcaggtttcagaatgatatagcgaaaatcataatgagaaggcaagagagagaataagagaaagacaggaaaacaaagaaacaaataaatttcacaagagaagaaactgctggatgtcagtgttgggttttgttcctagacatatctgtactgagtgagaaaccatgaagccaagggaagagtctagaacttgttcaagtgaagcatcagcatatttctccaaggcacctattgtcaccccatcacaagggtgatgagtttttgaataccattaaatatgagttcctagtaagtaatcatgtttccatgaaattcagttaaaatgcaaagggtgtgtccagatcactcatgcacaaaaatacaaaatttgcctttgcatttatggctgcatagaggtaaagtccattgagacttcagcaggttacagagatctgttaagttttggattcccataggagagtgcctcttagtgaaggttggactattaattaagtatgtacaaattccctctatgggagtagtgttccatttgtgtggaatttttaattccttattgaattgcaaaacaaatcccaaggactgactccatggagttttactgtagtgttcataaaaatatttaataagattccttccagtgtttcaaggaaagtttttctctaaaattttttctaatacataaattttcctgcctaaaattgaaacaggctgttgttaaaaagacatactggaatggcagctttaatctgttggtgataggaatgagcataatacatgaatctctttgagtgttctgcctcatccaaatactgtatggcaaaggctagtattggaggtaaaatctctaaatgtatttgttccagccatcaagtcatggggcaataacagatacatccttgaggcagaggaccataatgccacagtgctagtaggagtacatgtcgccaagggagttcaagggttccttaaaattgtgataattttaatgtaagaacaccttattagagacagggtttcagcatgttgaccaggcttggtctagaactcttgacctcttgatctgcccgccttggcctcccaaactgctgatattacaggagtgagtcactgtgtctagccagtccatttattttcttctgcacatggatacccataaacttatgtggaagattgtgggaggttataacagtgtcatactttagtatcagccatacctcacagaatcattttataatagttcctttcatgggtgtacttcactcagttcatgcaaaacctggcaggtcacaggctaaaaacacaaaataccgaagtgtttaaccaactgaaagggctgtagccttttgtcaatgaattatttcaagacacggagaacacatatagattataaataaaatactttcacatccccttaagggtggaaattgaggaaattttacctaaatgtgtccaaagggccctgtggcttggtttctgtctaggtcccaatgatagggttctcccaggattttgtggctgtcttgttacacttcatcaagaattaacctctgctgtttcctcaaagtgtttaattggataatgaatttgtctataaattgaagagttgaaatacatcaaatattaatttgtaataatctggcacaaattatctaagcaaagtcaataactagatgttttttcatttatttttatttaaaatcaggacctaaagttatgctttaataacatctgtgaccctctcagcagttttctcttctgaggatatgatctgctgtggcagttttcttagcttcaatgttacctctttttgcaatgactaccgtctttatatttgccaggaatctgggataaaggagtgcttctaagagttccctaacttgcccattttggtgggtgttccggaacatatgagatgctctgttgttaacaaagcatcccaaagccatgcactgccctaaaatgtgtttgtttcctagtttgacaaattggaagttctaataaatacaatcacttctgccatctgggctgattttacatcagatagagggctgtattccaaagaaaagcttacattagtaatagcaattttagtcaaaagcctagagttttatcattgaggtgcaattcataacaaataatattaggtcgaggttctcagtggcagtgtctaaatctcttaggtgtacagggtcttccctgttaacatgaagcatttataagcacagtcatagtttccagccatgcttctccctgtctcattatcaccacaaactatggcctcacctggaacttgggttaatttccaaataagtaattttttagtctttatgcctctagattattatgtgagaaagttaacattcagtagaaagttaaaaagaacatttgaactgactaaacaacacagaaaatcaagaataaaattcaaagcctagatgtgagaggctccaggcctggataatgcaatagttcatgtaggcaggcagtttctttgcccagttctacactgatacacccagaatgtcagcttcatgccagatttgactcctattatgtagagacatggcaatacattctcaagggtcacatgaaataatatgaaaattggtgggaataggggaggagacaactctgcaattctcatctgaaggaccaggaaagcctggacagaccatctccccagcctccgtgactgcaccacgtgcccacatggacactcatccctgatagggtaagaagactccattgatggggctgagcattttatgatagaaattactagagactgacgtggaggtttcaacaactaatatttataaccaaaatttaattacccccacattgttaccattttcttcagtgaaaaattgcttgccatgattaagttttaagtagatttccaatgttcacaactgagcttccaagagagtcttgagaacaaaaacaatgagggcagagaaatctatcttttctgtattcaccactaaactcaagtggactcagcactgcctttgatcactgctgcttctctgcagagttcaggtttctacttctcacaattctgacacacattctacctctcctcaaatgtttggcctctgcttcttgtaaggtcaccctctgttcttaacttcttctctgagtcattttgtgaggtggtcatgagccattaaatggatattttatattttcccaacatgaatcacatgagtggtcatgaattatacttctgattatggcagttgatttttcttggcatgttcatgactagtaatatttgaagccatttcattcaaatcttcggggcttcgtttttgttgctatgacattttttcttctattgagtctttccactagtattataacatgacctagtatccaggctcagttgtcattaataataaccacatatgtcaaaaatcatgcattcttttcacagcagacataatttcctcttttctgcagatgaagacacactgctgagctacccccacttacaagaatatatgcacaattatgatatcttcatttatttgactaataagctatatcattctcccttcaaattctttaccccccagaagtcctggacaaatttctgcatctgctcaaaccataaactcagaactacatggtgagtaaaagtcacctggttctggatattgggtccatctcttcccctccaatgtcccagagcacctcagcacacctgtccaggttctatcaagaaagagtagctcctgcacactgaaggaaacaattgagttaagagaggacctgcagatgatagacaatattgaaaactattaatatgacaaaggattactaccaagcatgtgaaataagctcaacgggtgtggtggttcatgtctgtagtaccagcaatttgggaggcaagttgcgcagatcacctgaggttaggagctcgacaccagcctgaccaacataaagaacaccctgtctctactaaaagtacaaaattagctgggcatggtggcatgcgcctgtaatcccagctactcgggaggctgaggcaggagcatcacttgaacctgggaggtggaggttgcggtgagctgagatggcaccattgcactccagcctgggcaacaagagggaaactccatctcaaaaaaaaaaattacaaaaaattagctgagcgtggtggtgggcgcctgtatacccagctgctagggagactgaggcaggagaatcacttgaacccaggaggtgaaggttgcagtgagctgagattgcgccattgcactccatcctgggcaacaagagtgaaactccatctcaaaaaaaaaaaaaaagagccttgcaaagggcaaatagatcatagacagacagatagatagatagacctattagtatacatacatacatatatatacactaatattcaggaaaatgcaaattcataatgagatgtcttttcacccttcatctctgctagaaagtttgttatctgaaaaacaaatacatacatacatacttattaaaagctggccaggatgcctagaaagtaaaactcatagaccactggtggaaatgtaaattagtgcagccatcaagggaaaaaaatagaactaccatatattccagcaatccaactgctaagtatatatctatttaaatatttaaaagaaaaaactaatattgaagagatacctgtacacccatgtttattgcagcactaatcacaatttctaagatatgaaatcaacatatgtgtccatcaacagatgaatggatacataaaatgtgatatatttacacaatggaatattattcagccttaacaatgaaattctgccatttaaagcaacatggatggaatgggacaccactatgttgagtgaaatgagtcagacacagaaaaataaataccgcatttctcagcgttacttctagaagtaaatagtagagtagtggtgatgagatgccaggaatgagagaaggctgagagataagaagaggtttgttaacaaacacacaattacaggtagacaggagggatgtgctctagtgttctacagcacagtagggtgactacagttaacaatatattgtacgttttctgtttacaagaagccagaagagagaattttctatgctaccaacacaaataaatgttagtgtctgaactgacgaatttgctcattgttctgattttggtcataccaagtggcacacatgtattcaaatatcacactgtatcccataaacataagcagttattatgtgccaactttgaaaaatcctttaattaaaaagaattatattggcgtacattacaaatgattcaacacagagacaggaataaataccatttttctttgaaatagttaattaactaacaatgtagttacattcatttgcaccaaatcgtgtatttgataatggtatgcatagacagagttatgcataggataatatcttttaattttagactactacttaatactataaatataaataattttaaaacaactaagtaaaaagaataaagctgagaaaatgtgtgtgtggtgtgtgatgtgtgagctttttcttgtgcaccactgtgtccttggtggatgtgtggttcatgtgtttgtttttatttactctgtttggggttctctttgcttctaggatctgtagttcagtttctttcacaaaattgggaacattcttcgctattatctttttcaaatagtttctgtgtatttataatttctccttctcagatttaaaatatacacatactataattttgatattaatgtttagtttctttcttcactctcttttcgtttgcaatttactttgtgaaatttctagtgacatactaatcacatggttttattgaaaagctgagccagctctactgaggtgtgtgccaaaagattgctcgatgttcatacagcattgcttttgatttcttacgcatttccatttgatttattcttagtattttcatatttcagttccctatctatgtccacgatttctttaagagattcttgcatatgaatcatagttactttacatatcttgtttaattagatatttataatatctgtttcatctacaaatctcatgctgatcatttgtttattacgactttggtacttctcattaatgtatgtaataattgttgatagccacagatactgggatggacagtggatactggcttattatttcattttatgcatttctgcctgtatttgaccacactttacctttgccaggcctttactgtggaagtatctgtgaatcttctcagaactatatttgacattcacttttgcagtggacatcaaagttgaagtctgttcttctgtgtccaccagagacttcagatcctccagtgatatcttgtttttctttcctgcttggctttgtctcttcacctgttccctcctccagagaatcatgttcagctccctcaggtggatttaaatgttatttaactgacaattgtgaaattggtggaaagcaatagaataaagggagattttctgacctttcctgggttcatattgtgaacatgagtctgggtgtgaccttcccaatgtttctgaacttcctccagatgagatgttggtctgtgtgttcttgctcttttccctgctgtggagtcctcttgttttccccagttgttccctcccacagctccaacgttctctttcggtgttatcaccttacagatttgctgactagaactgcagattaaggctctgattaaataagaaggaggggagatacttctcaatggaacttaggtgaagacctcttttcccatctcagttcctaagggattgccccagtgcccctaagatactggttttggtggcttgcccctccagaataatttctttgttctccagtggggatatggaaggtgggtctgaacgcttttcagaagggtgggcactttttctctcctagacagacacaatgggacagaacaattttggtgactgtccccattttggggaaaaaggattcaataggataggaaaactcttcagtctgtggtccctaagaaattcaccctacaacacatttaccacacttgacttcaagcaatccaatatatatgtgtgttttcatcttgtaatagcctacattttacatgccatactctgcctcagttcagctcataccccagctttgttactctttacaagaacttgcctctccctagatttcacatttgctgtttatcttaaaacttcaagtatctaaagtattatttttaaaaaatggccagttgtggtggctcacacctgtaatcccaacgctttgggaggctgaggtatgtggatcacctgaggtcaggagtttgagaccaccctggccaacatggtaaaacctgtctctactaaaaatacaaaaaaaaaatagcttggcatggtggcaggcacctgtaatcccagctacttgggaggctgatactggagaatagcttgaacccaggaggcagagtttgcaagtcgtaccattgcactccagcctgggcgacagagtgagactctgtctcaaaaaaaaaaattccaaaattccagctcctctgtttatctatttttgttgatactgttgttgtaaaacataagtaaaatatattattcatctatgtacatttccaagctgtgtagaagaatttttaataagacccagagtaaaaaaagaatgcaaatatgtaggggccagccctacagggtctgtggatctttctccccatgtgcagagatgagagatcgtagaaataaaggcacaagacaaagagatagaagaaaaaacagccggacccaggggaccactaccaccaagacacagactagaagtggccccgaatgcctggctccgctgttatttattggatacaaggcaaaaggggaagggtaaggagtgtgagtcatctgcaatgattgataaggtcatgtgggtcacgtgtccaccagacagagggcacttccctgtttggcagccgaggcggagagagagagaggacagcttaggtcattatttattccattctcttctcagaaagatcaaagactttaatactttcactaattctgctactgctatctagagggcggagccaggtgtacagagtggaacatgaaagtgaaacaggagtgtgaccgctgaagcacagcatcacagagagacgtttaggcctctggagggctgcgggcaggtttgactgatgtcaggccttccacaagaggtggtggagcagagtcttctctaactcccccggggaaagggagactccctttccaggtcttctaagtaatgggtaatgggtgccttcccaggcactggcgctaccgctagaccgaggagccctctagtggccctgtccgggcgtgacagaggctcacactcctgtcttctggtcacttctcactgtgtcccttcagctcctattgctgtatggcctggtttttcctaggttataattgtagagcaaggattattataatgttggaataaagagtaatgctacagactgatgattaatgatattcatatataatcatatctataacctatttctagtacaactattcttattttacatattctcttcattacactggaacagcttgtgccctcagtctcttgcctcagcacctgggtggcttgccgcccagacaaatattgttaagcttcttaatagaaaaacaaattatggtaaatgtgttcactggaatactacccgtcatttataataaattaatgcctgatacacagagcaacaaggtaaaatatctaagtatttatgttgagtaaaataagctaaacaaataagaatatatactatgtaatttcatttttataaattctgataaataaaaatgcatctgaagtaaaataatgaagataagtagttgcctggggtaatggtagaagaagggagggggagaggaggaggaatacagcagaacaaggggaaatgttgagaagaattcacttgtccactttcttggtaatgatagcagttacatcatttttattagttgtacattttaaatatgtgaagtttattatctttcaattaagcctcataaaatgtcttacaagcaaacaaatggaaacttagacaaggaaagagtaatagaaagacagaaaaaataagttcaatgtcagaagtacctgaaaattaatgtgcctggatcctagttctctccatattttcagaagagtgctggagggcagcaaaaccacacatgctcttattacggaatgtgggttctgataaaaacactagacacatccagctttgtcctggagttggtttagggggatgtcagagacagtgatgaagagcacagggccagataccggggttcactcatcccagacatgagctccgagacgcatacagagcccccccatgtgtgggtttacttccacttctgtaaatggagaaaatattgtctcctacagaacatagtttacatgaatatttaaaatgaaatagggtgattagtgcaaagtgtttatcacagcacaatttcataataagacagcatattttccaaatgcaatcattgccagcaaacttctacagggcaccgtcgtcttatctgggtacagcctactcctcaagggtcccaccctagagcttgctatatagtaggagatatgcaaatagggccctccctctactgatgaaaaccaacccaaccctgaccctgcagctctcagagaggtgccttagccctggattccaaggcatttccacttggtgatcagcactgaacacagaggactcaccatggagttggggctgtgctgggttttccttgttgctattttagaaggtgattcatggaaaactagagagatttagtgtgtgtggatatgagtgagagaaacagtggatatgtgtggcagtttctgaccttggtgtctctttgtttgcaggtgtccagtgtgaggtgcagctggtggagtctgggggaggcttggtacagcctggagggtccctgagactctcctgtgcagcctctggattcaccttcagtagttatgaaatgaactgggtccgccaggctccagggaaggggctggagtgggtttcatacattagtagtagtggtagtaccatatactacgcagactctgtgaagggccgattcaccatctccagagacaacgccaagaactcactgtatctgcaaatgaacagcctgagagccgaggacacggctgtttattactgtgcgagagacacagtgaggggaagtcagtgtgagcccagacacaaacctccctgcaggggtcccttgggaccaccagggggcgacagcacactgagcacggggctgtctccagggcaggtgcaggtgctgctgagggctggcttcctgtgatggcctggggcggcctcattgtcaaatttccccggggaacttctccagatttacaatcctgtactaatatttgatgtctctaaatgcaaccttttttttcctttttgtgtctgttttttttttttaaaacaggaggacacatcctcacctccacagaagccacagtgtcactttgggggcagaaataatcctttcgtggtcaacagggtgagagttttgaggaatcccagggaaacctggggaatgttttccaattagactcagggcagagacctccatgggaatctctgattagaacaggctttgagttctgatgggagccaagagagaggctcacccagggtcagggttcttaaaacctgatggttttcacagcaatcccccttcatcttgtgaaactgggcacatctgactcagactgattcagttgaccctctttctgctaatccattttccttcccagtagacttgattctcacagatccctttcttcttctctttcctgaaaacagaggatgtgttttctgtagtctaaattccaaggctcaggtccgcaggagctgggtaggctgaggggtcttcctcactcactattgcctggaaaatcctgctgtcttctgtgcatggaggcatttggaaaatgaagcaggcattagtcatgaagggaataatactagttttctccaatgggatgttgatgtagagctgatcttatgcttctcacactgtcacaaagtttggactctcacctgtgactttgaggagagcttgtgataccttatcttgttttaatatgaatagactctcccttagctcaggaagctggaacagactccatttggctccttcatttgtaagacatcaagggctcctcacccacccccttcctcaaggacttaacttgtttaagctgactcccagcatctcaaagagtgcgattaactgataaggtactgtggcaagctgtgtccgcagttcccaggaatttggccaggtgatggtaccctaaagcccctgcatttgtgtctggcagataacacccagagcccccacacctatcatcttgtgatgaatttaaagcccctgcacctggaactgtttgcctgtaaccatttgtcctttcaacttttttgcctgttttactcctgttagaatgctacagttaggctccccctcccctctctaaaccaaagtataaaagaaaatctagcaccttcttcggggctgagagaatttccagcgttagccatctctcagttgccagctaataaaggactcctgaattcatctcaaagtgcggcgtttctctctaactcgctcggttacaacaagctgaggatggacactccattgtgcagtgagctctgggtgacagtaatcgtagggtctccccgggcagcctaaggtcaatactgctggccgtcgggaaagacaggctggaattcctgggaagacctgcatctgccatctaccacggagtcctatggtcttctgttacactctctttgaatcagcaccacctagattatctaaaacactctttgtgacttcatgactgggaaaaaataatggcagtctctactaacacctgtgttaagccatgggagcaacacctaggctagtgtgtgattgagtagttgagactgtggtctagtcaaggtgacacataaaattgattgttgccattatgatattttattttatatttgacaatataatcatgctcatattataaatatttctgttacattatttgtgtcagaggctttggaaccagaacaacttcatcttgaataaggggtaggaaaaataagactgagacctgctgggctacattcccagtaagctaaggcgttcttagtcacaggatgagataggaggtctgcacaagatccaggtcataaagaccttgctaataaagtttacagtaaagaaactgggctgaagcccaccaaaaccaagatggtgacaaaagtgacctctgtttgtcctcattgctcattatatgctaagtattatgctttaacattctaaaagacactccccacagagccatgacagtttacaaatgccatagcaacatcaggaagtttccctagaaactaaagagtggaggaaacctcagctttgggaattgcccggggaattcatgaataatccttcttttgtttaacgtataatcaagaaataaccataaaaatggacaaccagcagcccataccacttctctgcctatatagtagccattctttattctcttactttcctaataaacttgctttccttttattctgtagatttgccccaattgggatccctttccagtaacatttgtgttattattggttttctaagcagaaaactctgagaggaggtgtcagccgggcttcctgggttgagtagaggctcagaaagcagtgaaactcactcatttcctgcatcaggacttactttggtcctggatgaataatattgaagatatatgcttaaaatattcctaacatcacaatttgtgcatgtgttttcttccctaagaaagctataaacagtgaaaattttgctgtaagcttccctgtgtcctctctccctctctccattccccctcccctgaaactaaaaggaatgttttaacattatgggcttttaagtctgtatttctgtgaccagcagaccttatctatgctcccaattcaaattccttgtaaacacaatttgtaaaatcctgcgagatcctgtctccttggccacgccactgcaaggtcataaagtagatcaaacttaagttacaattctgattttcctcaagatctgagacatgttaattgtctttgtttcttgctcaggtaacatctctttttgctcttttttatctctttttgcacttaaatctaagtttacattagtcatgtatctagaatgtagaaatatgtcttaaagttacttaactttttaaaaaatttatggggtttccagaagatgtgagaacctcctttatttataaaatagctgattgcacgttgctcaataatttcctctttaatttatctctctcctgtcacattatactatgataagcaaaaagaaatgaaggcataccatcaacagtttacttagatatctcctcagctaaatttctaaggtataatttactaattctaattttatccaatttaacataattaagataaattatataacaaggtacacatatgttccagttctaacaccatgtttgtgacagaaataaaacagagcttctctctgtaatgtggtcatctgagccctgaggtgatgggtcacacaggtatttttatgatatttaagggtttggtcaagaacagtgataacaagtctgaacaagactggtcatacttgaaaggttacaggtaaagttactgctgttattttatattaacgccttattagaataaagctcagaggaagaggccacatcctaggtcacagtaggaggaggaatggagctgtgctctgctctccacactacttttcacatcccaggcacaagcccaggttccatgacgcacggcatctagagggcagttctcaggggatgatctcagggcacctgcttcctcgggcagggcgcttccttctctcaattgcagacttgctccttctgcaaggtctgaagtcagcacttgtattcccatgatttttacaggttctcttccctaatatggcaaaaatctttttattaaattttcaattttattttctctgaagcacactgcattagcagaaacgaatatatcacattccttatccgcccacacagccaaagattcctgaagacagagctgatgtgacgtactcataggtggatctctgcccctcagaggtggccttggtcttcaagtttcagcaatttctaggaagccaaagacacctccatctactcctccctgctcgacagctcacctgagaacagctttctcattggaatgtcttgtgtttaagaaataaaagttgctgtttgaggttagggagcccaggtgcacctaccagatccagcccaggattggagatacttttcagaagacaacatcacctgagacacgaccagtcccactgtttcactttcacaatttcagcttcttcagaagaaaattaaaattgttgagacttgttcataagcgttgtgccatgtcctttctctgttttcttgcctgttcattgatgtcatgccaggtgccacttctatgtaataggatcagaattctgcctctagtaacacatcagaggtgaggtttgattgtacttttggtttatgctccaaaacgtagattataaaattcatcaccctcatttttatgtcaaaagtaatctgcataatctggatgtcaatactttttggaatctatgaaataacagaaattgcaagaaatattacccactccaaacctggagagacaggcatgtgcagaatggcaattgacacctgcttaactggagcagaagctgcagaagccacaagctgttgagggcacttacatggtaagcactacagacgtctgaagacagatgtggactcagtaaatgtaacagttccagagggtcttatacttctaagttttctggaatttctttccagaaacctcaagattctaaaatgtacattccaaagacatttcctatagatcaaaattgcagatattaattactgagaaacataccacgagccttcttcaaaagcttctacaggaaaggacttttccagaaccttatcctatgtgaaggaagacaaatctcccactgcagatttctctcccattcttccataattgtagaaatgagtaaagttagccaatagaggtaagatataagtaaataatccagggatgctgaaaacaaaaaagggagtaatcgcccaaaatgagcttttcccctggagacgcctggtcaagatcataggccagaagaggaagctgactgtgtctctaggtttccactgtcagaacaggcagtgcttacctgcactgcacaatccattctaaccaggatgatggctctggattaaaggtgaaagtgtggcaatgcacagactctatctgaggagaacacaggaaaactaaaggacaacggcagagggtgagacaagaacagtagagcaatctgaagcctctgacatcatgatttttaagaccaatgtcttaaacactccttcattgacctcagcttctttcatcatgaagcctttgcagtgactctatctgagaaaaagaaaataacctcctgcatgcacttctcaagtctctgcttgtatcctgtttgctttaggtctctaggggaaaaagtcagatacctggacctagtgtcagtgtaggaggcacatcctaaaagctacaaactaggaagaagggaagatgggtgttattggaatagtggatatggagtgggctttcttctgaaagtatatgcacctgctggtattctcagatgcaacattcaactgcaagagcccattgaagaaacaaggcactcccaaatctcctgtaagattctgtattcatttcagataagcccacatgtccccgcattaactttttcttcagacaagcacatacatctgaaactgaacagctatgtggcaaaataagctcaggatagaagtaattgtggactccagctctgacaatttgtagatctgcatttttaaaattctaactgaagactttgctttattgtagaggacagtggtttacagctcgaattgcacagcctacaggcagatgtccatttcctctgggcaaggtttatttttatttgtttactgtacttatttgttgacaaacattgatactataaagataccctaacagcgtccacatgaaagaaaaagaaagagcaatggacacatcaaccctgaacatccagtcccaggaatcctttgaccctgccctccttgcaacccagagatatagattggatgagccctgctgagcagaacacacatgtccccaggagaaagacatggaaatgaggcccctccctgctaatgaaaagcagctcttcccctcttctcctgcaggtcctggtgaggagccacccaatatctgtgcccttcctcagtgtccacaccatcgggtctatgatgatctgggcttcacttgtcatcactctcaatattgaggttccccgttaaacagactgagtgaactgtggctgctccacgtgggggctgttctcagtctgttgcttctgtgcttgcagaggtcccctgtgaagttaattactggagtctctcagagaaatactacagaccaagaattctcagacttttctggaaaccctgtggattcactttcactgaaaacagcataagcttggtccagcaggcttcatgacaggggtgggtgtaggtgataacatcagtaattcaagtggaagttctcagtgggactctccttgagtacaaagaagattaacagtcctcagagacacgcttttcagatgattctctcttaagatgattaacctgagagctcaggaaaattccgtttattactgtgagggacacggtgaggggacatctgtgtgagctcagacacaaacctgcctgcagggagacacaaacctccctgcatggtagatgcttctcagaaccaccagggggtgcacaggaaaccagaaggtgctcaggacaccagggggtgctcagaaccaccatgactcactcaagacgccaggggcgctcagaaccaccgtggggcactcaggacaccagggggactcaggaaactagggggtactcagaaccaccaggcggtgctcaggacaccagggagctctcagaaccatctgggggcactgaggaaaccaggggactcaaacactagggtgtgctctgaagcaccagcggaccctcaggactgcagggggcgctcaggacactagggaacactcagaaccaccaggaagcgctcagaaccaccagggggccctcaggacatcagagcgtgctgaggacctccgggggcgctcaggaccttcagagagtgatcagaacaccagagggcgctcagaacaccaggaggtgctcaggacagcaaggggctctcaggacactagggtgtgctcagtaaaccaggggtccctcacaaccaccagggggcactcaggacaccaggggatgctcaggacaccaggggccactgaggacaccaccgctcccttagcaggcagctccacatcaggcccctgggttggggcaggaagggtgttttccttttggatcttgccactaaactcttgggagtttttctccttcctttgtggtttcaagaaacattggtagattcttctcaggtataaagctctgctttcttggattatgtaatgtttttggtttcggatgttaccagaattacactgcactgtgagaggattcattcctcgtgtgtgcaatagtgaatgaaagctccaatgttaggggtggctttgaaagctacgttaggggtggctgagggcagttagcaggaaatgatcatcactatagaaggctactcatttctttgcacatttccataaataattgtagtttatgccctaaaaactgcatgttttcttggccctttttcttaaatgcctccaatccaagaccagtcatctaattaagctgtatgtcaaagaccaccaatcaagttaagtctgtttaatgaaacactttgtaaacaaaaaagtacatctgtgtttgtatagtcagctttaaattttacattgctttacaaatattaattttgtaaatttagtctcataattatcgtcagtatttaaaatcttaaagtcttgctatgttaaattaagtaatcttagctttctcactatgaattagagttactaagaattagaatagtaagagcatgtaataagcttttggtgaagtttataaagaaagatgaagatacattttttgctttaaaatattttgttttccagtttacaggacctttctactggttttaagataacaatcactgtttacatctaaccctttttttaaacacctgctgtttaagattataaaattataaaattaaaaacctagttaaaaccagattgatctttgtaatttaacaagatgttcagtattgttgttttaataaaaaaaaataggtaaatacttagctactagaaaaataatcatctacttaatcataaggttttacttaggtaaacacctaaatttcatgggttataaacatggttaataggtgaaaaactttaatggacaagtattacagttttcataaatattctaggtaagctatttaaaaaataaattaggtaaatgaaataaaataaaccatttaaataaacttgttctacaatttaaaaatctaaagtttaattaaataatatatattatataaatgtttatgcattactaattgtttaaaatatatatactataaggaaaactttttaaaaatacatattataagaaaatattttttgaaaacatttgtttttagaaaaataatttatttaattcaaaggttaattataaaatgtcataaacatacccagttaataagagaggtttaaagaaagttctagacatagagaagtacttttggtaagaaaggttaaaataaaaaaaaattatatgagagggaattttgtaggataactttttatatataaaagtgactatttatgaaagaataatgtttagaataaaacaagatgttcaagtatgccataaatggttcgtgtaagtcaaaataaggtttatagaaagctaacttattaaaaaaacttcatgttatcgagttgactataattgaaagggaagaatttattatagtctttatagggatctggctttcatatgaaaatatactaacacactgaagattggttagaatgacaaaattgtcttaaagtattgatttattcaataaaattataaggtattataattttttaacccaaaattttaacttttgttgcatcttgccatttttatttttttccatttgagaaggcttgagaggatctcaactttttcatcagctcctttaacattgtttcttacttacagcagttagcctctgagttaacttctaactgttgttagtttctgactgctattatttcctgatgttaaaatcctctatcttaaagttctaaataaaatgttttctttcaatataatattcagtgtcgttggcttttctttaactgtctaaatttttctatgaaaccaaaatcttcacttgtaaagacacattcttcctaggtctgattaattcaaatacttttttcattagagttgacttgcaggttatgtacatggagttccccataggaaaaaacagtcacagtgcagaaggctttatttttgctatttggtaactggcatgagacaaattttaaatttcattgaaataattcctatgtaagtgttattaagtttttcaactacttagtaatactgagagtttaagacaatagaaattaatgttatgacattcatgtaactatctgtataacttttaaagtccttgtgctgctactttactgagctttgaatcctaggtctaaaaaggacacacaacactttgggaggctaaggtgggcaaatcacctgaggtcagaagttagagaccagcctggccaccatgacaaaaccccatctttactaaaaaatacaaaaattagctgggcatggtggcaggtgcctgtaatcccagctacttgggagcctgaggcagagagaattgcttgaactcggggaggtggacgttgcagtgagcagatattgcactactgcactccagcctgggtgacagagtgagactccatctcagaaaaaataaataaataaaataaaaaataaaaaggacaccaagtccagctaaatcttaaacaccgacagcaattaaagccccatctacagacctggaagaaaatgacaagaaaaattgatcacactctcaagacacaagcccagaaattgaaactacttaaccaccccagccccagggactattacagaagaagtggctttgtaagattgtaaaagctaattttgagagatgaaatcggttcagagtttctttataaattaaacattaatgcaaggctagcatctgggcccctgtgccagattgaccagggtttcttgaagaattaatccacatttaaatttaaaaaacagataaaactgtataaaagatctatgcaaattatttttatggtaaaagtaattataatttaatagatttatttttcagaattgatagttttaacttttctcatgctgttcttctaaggggttatattttagaaaatcaattctactctttcaaaaatattttttttcttttttttagaaatcactgagttttcatgtggctaaataaataacttattttacaataatctgtaatcctattttgtaatatcaagtgttgtaaacttttgatatttgacaaagttcacaaaataaaattctaaattcagtcatttgaacaccctgaaaagaaacacatttagcttatttggtacagttaaattatacaggaagtaatgtcaaatttgcaatggttattaactttggactatatttatataaatgtggactatataatttgaatatacttatgtaaagagtatatgttccaaaattctattagattcaagtgatttttatatgtcttagtatcagtagtacttatgattataatttaaaatttttgtttatcacagaaataaccaaattttctcctcaattctgtctttaaccaggggtattctaaaaggtcggtcattcacaattgttgttttactttgattctttatcaggtggcttataataatctatagaactttgagtagtactcttaaatatacaatatacaattttgacaattttataaattgtgcctttggtatagagagaaaaacttccatgagtctcatgagacctgaagcatttatgatgattgttaatctaatatcaagcaggacaggatgtaattgcatgaactgaatgaaaaggagactgaaataatttttataacttattctttaaagcatttgctatttacttatgttttattgttcagaatcaagaaaactttgtcttttaagctattcacagtttttaacaattttaactatactctattgagaaaaattgaaaatataatttcttcttctctacataatttctccaaaatttggaaactgtaggtattcttatatcaaaatagttatttgcataggttcgataaaaatctgctttcttccataacagagcacaattagagacaatggtcactttaccaaggctttaacttgaatgacatattttctgatttactttataaaatgaagagctgtacagctgatataagcccctttggaaaactggcattttaccttttttttttttttttaacagggccctgagctgtagtaagtaaataattttgctttctgacaggcccaggaaacccaagttttcttggatacttgaaaaaataaaaagtaaaccaatccatatagctatctgatggcacagataaaatattggctgggcttgaggcttttaaagatcttacccttagattccttataaaaaatagcaaaagcaatgtatgaataaaacagcctatgtacaacaaacaacaacaaaaacaaaaacaataaaaagagagctaatatgttaagtgattatttttgctgcatcttatacaaaaaaatcaggccaagtataataagcctaaaatttattttacaaataaattagtcctattatgattttgtctccaataaaattggggaattatagggagaaatattctttcaaaataaactatagtgcatctgttattaggttctaaccttgtccacttgtttttcaatttacaatattttctacaatttggactcaattttaaaatatttctttccacaagtctccaaaataacattttcagtgattttctttttaaatatttttttcctatttgaaatctccagaaggtaaactgtgctttcttacagctagtcaacttaaactctaaaataaaataaaatcaatgatatggtttgtctctgtgttcccaccaaaatctcagtttgtatagtaataatttccacatgtcaagggtggaaggaggtgaagataattgaatcacgggacgtgttttctccatgcttttatcctattagtgagtgagttctcacaagacctgatggttatataaagggcctccctcttcacatgacacttctctctcctgcagccatgtgaagaggtacgtgtttgctgccctttccatcatgactgtaagtttcttgtggcctccccagccatgtagatctgtgagacaattaaaccttttttttaaataaattatccagcatcaggtatgtccttatagcagcatgaaaattgtctaataccagcaacttaattatatacaaaaattccttttataccctcctactgtgaagggaaaataaatcttgagaccccaaaattactaagctaaagagaagagtcaatgtggtgttacaggagatagaaagaaattatttaggtagatagttgggatgagagagtctctggcaaaataacttttcttctaacaaaaatcagctcagaaataacttcttctctaattacacacagttcaaagaaatcacttctaacaaaaagcagactaaataatcaggctgtgaaatatagataagcaactctgccacagagagggtgtttctgggtgtaatcaccaaacctcacatatataggatgggtcccagtaaaaacagtgagccttaataagcacattccttttcttttctgggagtacactaagatagaaaagctggaagcttgcacggggtttgcgacgccggcacctgtgaggaagtacctgggaccaggcaagaaaacccttctggcctttcttagcacatgcacggtggaagaagataagcagtgtggaggagatcaagcaaagtgcccgcctgcccaatgaaagcatgaggtggggttgccagagactttgctctatgcagatggcacacattgtcctaactgtttttgcaccctatgctgataagacaccgtctccccacgagcacatttataaaaatccttacattttactgcagcacgataacccatttgggacccctctctgtgacagacagctttttttttattttacctattaaacttgtgctctaacctcacccttagcatgtctgcgaccttgatattcacggccgtgagacaaagaagttcgggtggtattccagacaacgaggctgccatactggaaagtgctttgggcaaatctgcctccccttctgtttaaagtgattcctctgaggctaacctgagaccaatacacagctgattgcttcctcttcactatcatttatgtaaaaacgaagatccactgagtcagactaaattgtgcattcagtggtaggctaataaagtactcaaaagaacgcaacctattgtctcttatctacttctaaactgcagtccgtgcttttgattcgtcctgccttacaggaaaaatccaaagtacattttacatatattgattgatgtctcatgtctctctaaaatgtataaaagcaagctgtacttcaatcgccttgggcacatgtctcaggacttcctgaggatggtcatgggtgagttatctttggcaagataaacgtattagtctgttctcctgctgctaataaaacataacaaagaccgggtaattgataaaggaaagaggtttaattgactcacagtttcacatggctggggacacttcacaatcttgtcagaaaagcaagcgacatcttacacggtggcagactagagagagcttgctcagggcaactcctctttacagaaccatcagatctaatgagaagtatttactatcatgagaacagcatgggaaagacctgcccctgtgattcaattatctctcattgggtccttcccatgacacatgggaactgcaggactagaattcaaggttagatttggatggcgacacagacaaaccacattagtaaacttcctaaattgactgagacctgtctcagatatttgtcgtttaccttattcatgttcagccttcagagttccaaggcctatatcagttttccaggattgtttcccctttttgttgtttgttatttcctcctttatttatatgttttacttctcttttttctcccactattttcttattaatggatgtgaaacttcacaacatttgaaatataggtaacaatgaactataataacaacttgggacctatttatctagaaataatccgtcctacccatgaaagaaaaaaacaaaaacaaaaacagaagcccagaaacttattttgtggtaaaatgcttcctctgaaatattttggaaaggaaaaagttgggaagatatgaaatgaaaataaaaacttatgatgtcaattcattacgtcatgaggggggaaaaaactaaaggatgatccatgcaagaaactgattttcctttcattcctaagaaaatagccacagacagataaaatgttagatatcttcacagatagctacaatttgttcatctttgaaatacttagtgcaggagaaccacttgatattctatttccctatgtgcttctttttcattactacatgtaagttttcatgcaattcctctttcccctctagccagcttttcccctttatatattgaaagccctaaaaaatgtcttttgggaatggcactaaccacgcattgtttctgtgattacttttcttccaagcatgccataactttggaaaaattaattttaatttgattgagagctctctcagaaacctttggttacactaggcaaaatccaaaatcaggagccaattattgtaaaaatcagccatagtacactgtgcgtctgtgtgtgtgtgtgtgtgtgtgtgtacatgtgtgttttaatttttgcgagctttgagccatgtagttctctctgtggagatgctatttggcgtgactttgaatagagaattctaaaagaaataagaagctcctatgagttctctgaaagtttctggactcaccatggatcttgactgtgtcactgcatctgacagtcccagggaacagactctctggtggtttcatagaatctatgcttgggctctccctgcagtttactgggtatagtaatgacaaatcactgtttcaagagacaatttcaaaagcattagatgctgctgagagaggattgtgaaccagggaactgcccctttcttcttggagagcgacattgggagaatatgctctgtgagcccaaacagcatcctcccctgcagggtgagggcagagctgcaggacaggcccagaacccactccacacagatgtcagccctggagctgctgcagaggagtctgaggagaaaatttttccagcacctgaattacacttatttcaaaacaaaaatgcaattaaaaagttaaaacaagtaattaatgtccaggcacagtggcttacacctataatcccagaaatttgagaggctgaggtgggaagatttattgaacccaggagtttgagatcagtctgtgaaaaatagtgaggcttcatctttatttttgaaaataaaaataaaataaaacataaaaaatttagcaaaaactacaatgcgtctttacataccccatcatacttgaagcatttacctaacccaatgaggtgatgaggacccaatttgaaaggagaaaattttagacttttcatatatcttaatagttggaagatgtagaagaaatatatttatatcaattaaatgtgtgcaaatattgacagacacaccataccaggagttcaacttgcaaagggtaaaaccaaaaaagtttgagattgttaatgtgccatttgaaggtgagatcgttttgaggaccatgtcctgtgagagtttgtttctctattagaggagttctgtactcataaagttctggacatgccaggagacaagtatcagtaaacaaatatcagaacttgaacttcagcttcccactcttgcattctccatgtgtcatctctctactatttctcattctagatcaggtctttagctatgaaatattccacctaattaacatgtaaatagattgaagtccacagagttaaatatgtatattttctcctgtttttcccagttgttccctcccacagctccaatattctccactgttaccatcaccttctagatctgctgccatgccctgcagattaaggatttgattccacgacagagaggaggtgcatttcaatggaactttggtgagaacctcggtttttatcccatttcctctggggctccaccagtgcatctggaataatgggttcagtggctggcccctgcagggtgattccttagttctgtagtgaagatgagggaggtgggtctgaatgcatttcagaagtatgggctctcctctctcagacagacactttgggaaaataagatttttctgactgcacccattctagaacaaaggaattcaattggataagaatgctgataaaaaaaaactcaaaccaaattaaatttaaaggagtttaattgagcaatggatgattcatgaattgggcagcccccggaatcacagcggattgaaagagaattcagtgcagccatgtggttgaagaagatttatacatttttttaaatgatgtacagaaatcagaagtgaggtacagaaacagctggattggttacaggctgatgtttgtcttatttaaacacagtttgcacactcaagagtgtatgagtggttgaggtatggctgctgaaattggccaacgctcagctgttggtgaggtgctcaggtacatactcctgagttaggttttcaatctcgtccacctattcaggtaggttacagtttgtccacaaggactcaaacatagaagtacggagtcctcctcaggccatatttaattcactttatcagtgcccttcagcatatggttcctgagaatttcacacggcaacatgtttaccaccctagaatttaagcaatccaatacatgtaataggctgtatttcacatggcaacttctgcctcagtttagctaacactatggctttgtttctctctacaagaactcatttctcccaaaatttccattttcctgaaaggaaaataaatctttgggaccctcatatcactaagccaaagggaaaagccaagctgaaaactgtttggggcaaacccaccttccattctttccctaaaatgatagctgttaaggtgtttacaagctacatatctccttcaaaatttgaccgcacagaaaatccttgttgaccaaggacattgtagaccaagcagagagtcatttctctgctcacgtaagtcaaatgcatatctgattgctccctttgctctattgtttcactaagccagactaaggcctatgtgactattcctgtaaactgtgcattcagttaaaggctaatcagaaactcaaataatgcaaccatttctctcatacctacctatgatctggtagctctccccccaacttcaatttgtcctgcctttttgaactaaataaatataccttacatatattaattaatgtctcatgtctccctaaattgtgtaaaaccaagctgtgtcccaccacactgggcacgtatcatcaggactccctgaggctgtgtcacaggcatgtccttagtcctggaaaaatgaacttcctaaatctattgagattagtctcagatactctttggtttataagtatgttttctatctcataacttcaattatctgaaatactaaaggaaatctgccaaataacacattatcttgtttatctgttattgttgttgcaaaaataaatatatttatataatttatgtataattgatcatctttgtacattaccaaactgagtagcagatttgttagtaagacccaatgtaataaaaaattcaaatatcaattagcaacttaatagaaaaacaaattacgctacatttgtttgccgaaatgctaccaatttttataaaaaaataaacacatataacataaatggtttaattctcagtatttctattgagaaaaataagccaaatacataagcgaatatactatattatttcattcttataaattctaccaaataaatactagtctaaagaaatatgaaaacatcagtagtttataaagaaatggtagaaaaagggaaggggaaaaaacaaataatataaaagatcaagaggaatgctgaggggagttgacttgttacctcattgaaaatagagattattttttcaaagtttactattgcacatgttaaatatgtgaattttatcatctgtcagttaaaactcataaaatttattacaagtaaacagccgacattttatacaaaaaagggatgataggaagaaacaaataaatacattaaatgtcagatacaccaaaaacttatctgcctgacccctagttgtctccgtaatttttggatgaaaaccagcccacccctgaccctgctgctctgggagaggagccccagccttgggattcccaagtgtttgcattcagtgatcaggactgaacacacaggactcaccagggagtttgtgctaagctgggttttccttgttgctatattaaaatgtgattcatggagaactagagagattgagtgtgagttacatgagtgagagaaacagtggatatgtttggcaatttctgaccttggtgtctctgtgtttgcaggtgtccagtgtgaggatcagctggtggagtctgggggaggcttggtacagcctggggggtccctgcgaccctcctgtgcagcctctggattcgccttcagtagctatgctctgcactgggttcgccgggctccagggaagggtctggagtgggtatcagctattggtactggtggtgatacatactatgcagactccgtgatgggccgattcaccatctccagagacaacgccaagaagtccttgtatcttcatatgaacagcctgatagctgaggacatggctgtgtattattgtgcaagagacacagtgaggggaagtcaatgtgagcccagatacaaacttccctgcaggaacgctggaggaaaccagctgcagggggcgctcaggagccactgatcagagtcagcccaagaggcaggtgcacacagaggctgatttcctgtcagggtgtgggacttcgtctttttaccatttctctagggaacctctctaagttcagaattctgtgcttaccagtgtcatctctacatgttttttaatgattattttaatatgagaacctattcttacatgcacaaaatgcagatggatgcttacagagatgaaaagtcctcaaccatggtcaccaggatcagccttgaggaaactcaggggtgcctggtgaatcttctccagtcagactcaggacagaaacctctgtgagattccctgactagatcagtcttcaggaattttgataccagccaatagagaggctgggacagggtcagtgtcatgtagaacctcacaggtttcacgtctgacccttctccttctcctgacactaaagtatgcaaatcagtatcagcactgatctgggtccccttttgctcttaaaccattctatttctttttatttgttgttgttcttgcttttcctcgtacttctcttgctccctgtaaaatggggaggtgtttcttgctgcaaaagccccaagcctcaagcccattccctgcagctcaggcggggctcaggctgtggctcctgcagccacatgggagtggctgttggggctttctcttctcccattgctcagcaccctccagtgtgttgtgtggagactacctgggaacgaatgtggacaacaggagtgaaggggatgagcttgcgtggacaaaatgggatgtggatgtgaaatttatcctgtgctgtacaaacaaccacagattcaacttcctcaccagtagtattagaaagagggtgtgaaagttgtcagaataaaaatggaaacacttgtgttaacaccctgacaaatggaactaggaatgaccatgaagaagtttctcatgcatatactccagaaaacaagaactaccgtaaatggattctgcttaaccacagccttggatagaagaaaccacaaccttacaaaaatcacttctacaaggatatcttcccagcaactccctgtttaaccctacagtgatgccacccttagtcctacaaaaatcacttctacaaggatatcttcccagcaactccctgtttaaccctacagtgatgccacccttagtcctgattctaggagcacaggataatcctctcaaaatgacttatgtaacccacctcattttcactgcgtaaacctatggattcacatcctggagtcactgctgcatttgttcttaatggtcattagcccctttcacaatatttgaggctgtttttctctgatgtctcttctaaaataaagaatttccaagtggacagcagtaaagaagctatttaggaagatgtaatgggaaggcatctttaacattctgttgaatgtttccacatggcacttcaatcccctaaaatactttgctgtatcagcatgtgatgaatcggagtataatattgaaggtaaaatgggaaatacatgggcttttgatgaatcaagtcataggatgagaatgtctgtgtccttgaggaaggagaccatgggttgtaagttctagtggaggtacctttggcaaagggagttcatgagtttctgaaccttatgctacttttaatttaaggaagcaatttatgatgtatgtttacttaaatctttccagagacatttgtcagtaaggacagggtagcatttgtgtaatagtgatgacttagagagttattttgtaattgctcctgtaaggtatgcacattgctcacttgatacagaagttcaaatgtcacaggtggaaaaacaggaataaaggtgggcagatcacaaggtaaggatcacaaggttaaccatcctggctaacacggtgaaaccccatcgctactaaaaaatacaaaaaattagccaggcatggtggcgggcacctgtagtcccagctactcaggaggctgaggcgggagaatagcgtgagcccgggaggcagagcttgcagtgagccgagatcacaccactgaacttcagcctgggcaacagagggagactccatctcaaaaaaaaaaaaaaagaaaacaggaataaagcaaattttatgaactgtcatgactgtagtttttggcaaggacattatcatgtcaacctgtaaataaacagacaacaataaaacatatcaaatccatggggagtctgacctgtgtccctctgtcttataagcacaaggctttgccacatccaaaatattattcaggctccagggtataaaatgcttttggactgtggaaggtaacagctctcccctcaggcaggggtaaggtatctggggaatgcagagttgtgttcataaggaagatgtcattatcgtgtcttctcctgtgcctggtagcaggtcctgaaggtgagcgtctcagatgtcagacatgggtctatcgggttaggataggtacatgtgactgacagggactgattctccatgtaatcacatgccctgtcccaggagcagctgcaggagtcagccctggacctgaatagcacacacttaccctctgcctcacctacactgttactggccactccgtcacaaccagtccttactagtggacctggatctgccggctctcagggaggggctgcaatggataaaatccattgctagtggtggtgggagtccatttgtcttgtggaaaatggcagcatttccttattttataaggcataataatgctatgttgtgtacacataccacattgtctttatccatttgcccattgacagacacttagtttccatatcttggctgttgtgaatacagctgcaataatcacaggagcgcaggtatcttcacaaggcggtaatttcatctctttgggtatatttccataagctgcatcactggtcatatggtatttctgttttaattcatttaggagccaccacactgttttgcctaatggtaatgatgggaatacagaatgtcatagccgctacgaagaacagttttagatttgaggtataatccaaaagcaaataatgtttgatcagggttctcatatgaggctctaataaataagtccagaaagttttcccatcttgggcaaggatgagtttgcccctaattgtctttgaggaagaagattggcagaacgtgagatggagtctgttggcaggattcaggattcagtaataactagtaatggcacagaaaaatagagagatagagacatacagagaaagagagaatatgaatctcataagaggaaaatttgctaaatatcagcattgggttttcagtcatagacacatttgtatgagccaggaaccatggagtcaagtgaggagtggagaatatgttcagtccaaaaatcagcatattctcagaggcacccattgccccatcacacaggtggagaattttggaaaccagtgaagtgcgagttcacattaggtgattaagctaccatgtttcgataaactttcattaacatgcaaagtacttccatagataactgatgcacaaatatacgagatgcctttttgcgtttatggatgtctagagaaaaataagtgagaaaatttttccaggttgcagagatctgtttaagttgcagattccataggagagtgtctttgaatgaatactgttctattaattaaataggtcaaaattccctctgttggagcagccttccaattatatagatttctttatagcttcttgagttgtgaaacataaacccaaggattgacttactggaatatgactgctgtgttgattaaatttctgataaggtttcttccaatgatttgagaatagctttcctgtttttttactcaaggaaatgaattttcacaaggtctcaggacatcacgtttcaggtgctttagttaaagagactcttcttgggggcagtcagctttcttccaaccatgagctcatttcttcagcaaaccattcgctttgtgcctctattaagaattatgaagcttttgtacttcaatgcactgaaaatcatgccccttgaattaaatgttgattggcactgacatgaattggccactcttgtatatgtgtcctatgttatgggctcaacataacagtggacagagaatcgtccattagctgcctctgattgtggcactgaccagattgagaatcctcagagtcatccatgaaaaagagagtccttaggttcatgaggttcttggagacattcaggtaagtggaggagagaaacaggattgggggctgccagccatttcaacaagactgggaacaattatcatctacgtttaaaggtctacatcattccaaacaccctccaggtttctctgagttcattgtgatgattacattcagctgcttctccagtgagtttaaatgagcatgtggcaattcagatgagcctggctgtggggtttattatatgtaaatctgaactacataaacaaagagggcatgtctgaccgtatgagggtgcaaaatcctggagaccccacaccccacactcttgtgctttcttttctccagcaacctccaggtttttttgtatgagaattgtaatagattatctcatggctaagtcatcaagagacgtaaactctgagaaatacaagcagaaaattctccagatagaagatccaggggaagaacatttctagcaccttatctatgtaggggaaggcagtccatctccattacagacccctcacagcagccttcctttataaggaaaatgggtcaaattagccaatagggtaagaatcctataatgttccagccagaaaagggaaagcatcaatttgacttctggagactctgtatataggtcacattccatagaaagaagagcactaaattattaagattcaattgtaactacatatgatacttccgggatgcacaaattaaagatgaaagtgtgacaatgcacaggctctgtcagagaaggagaacgtagggaaactgaaagagaatggcagagagtaagacaaggacagaagagcaatatgaagcctctgacatcaactctgtaaggacaaggtcttggcaactcccgcattgaccacagattctgttaccatgggccatttgcagggttcctagctaaggaaaaagaaaaaaaaaaaaactgcatgcacttcccaagtctccacttgtatcctgtttttcttagatctctaggacaaaaaaaatggcataaacctagacctagtgtcagtgtaggaggtactttctttataggcaagacactaggaagaagggaaaatgtgtgttattggactaggagatacagagatggctttaatctgaatagatctacacccgcaggtattctcgaatgcaacattcaactacaagagcctaatgaagaaacacgaccctccccaaacccctgcaagctcttgtattcactgtgtctccactgatttagtgcacctggagcttcagagcactggctccctcctgtgtcctagaatcttttctttgggtctttctgcagaattcaataggattagttaggctaatcaattgtttcaagagatggtgttggcagcatatattgtcgctggaagagtattctaagccaggacacaggcactttatgccggactaaagactctggagaaaatgttttgtgagccctgacagaaacctccttgaaaggtaagggctgggcaggaggggcactcaggagccacgcagcacacggtccagccctagaacaggaggctggggaggaggtttcctctcagggcctcggttttccttcgtcagaaaaaaaaaaatctaaaataaccgttcaacaagttgctgatatgccttcaaatatcctgctacaatggaacaattcatataacttcaggcaatgagaactattttttaaatcgggcttctaggattataagtatcttaatagtgaaaatgtgaagaataggtatgattttactatttcaatggatacagaattgtgggagtcactatattcctatgaacaaaaaattcagatttcagtgttaagtaatgttgcctacattgtgtgagtgacggggcagtggtggatctgagagtgtggtgggtgcacggacataatgattcagaaagcaatatggaaagatgagtatctatggatacgaactgaaagtatgtaaatacttcacaaaatactaataaacggagttgaatataaaacccataattatccaaaacacaaatttcttggaagttattttgggaacatgatttcataaagaactccaaactcttgtttcaacttctgactcctcgtttctgtgatataagaaaaccatttccaattatgcatctcagggcaattctgtaaacccagagcatttctgctgaagatcctggggaatcaagacaccgggcaggtgatggagacactgtctcaggtgcgcccaacgaatctcagaggaacctgctggagagtcacgtggaacatctacagtcagtttctcagagtcaacagtgagctgtgttggtgcctgaggggaccatgatggggccaaggcacgtgctcagtgtcgtggacagtgatggtccagaaatgatctagatggtcttgacgctaatgaaatatgggttcagagtgaggagcataatctgtggggacttgttcttcagtgaaaggatcctgtccgcaaacagaaatggagcaggacatgcatttcttcaagcaggattagggcttggaccatcagcatcccactcctgtgtggcagatgggacatctatcttctttctcaacctcgatcaggctttgaggtatgaaataatctgtctcatgaatatgcaaataaccttagatctactgaggtaaatatggatacatctgggccctgaaagcatcatccaacaaccacatcccttctctacagaagcctctgagaggaaagttcttcaccatggactggacctggagggtcttctgcttgctggctgtagctccaggtaaagggccaactggttccagggctgaggaagggattttttccagtttagaggactgtcattctctactgtgtcctctccgcaggtgctcactcccaggtgcagctggtgcagtctggggctgaggtgaagaagcctggggcctcagtgaaggtttcctgcaaggcatctggatacaccttcaccagctactatatgcactgggtgcgacaggcccctggacaagggcttgagtggatgggaataatcaaccctagtggtggtagcacaagctacgcacagaagttccagggcagagtcaccatgaccagggacacgtccacgagcacagtctacatggagctgagcagcctgagatctgaggacacggccgtgtattactgtgcgagagacacagtgtgagaaaccacatcctcagagtgtcagaaaccctgagggaggagtcagctgtgctgagctgagaaaatgacaggggttattcagtttaagactgtttagaaaacgggttatatatttgagaacaaagaacaatagaaacacaatcgaattgtaagagaaatattccattcaagagccaccacataagccaaactgacagagtgggaaaggccacactcagtaaagttgatacaaacataccataaaggtgctactatgaacaagtttttgaattagatgaataaatcatttggagcaaggttatttggtcatatgttaagagtaagcatgattcttacaaagtgggaaaattgtctttcaaatgtttctgtcacttcttaccataaagttcattttagaggttttaggattacagtgaaattgcacagaaggtgtgagaattcccatgaatccctgccccgcacggacaccgcctcctccactacagccatcctgccccacagtcacaaataagtcacaatggatgaatctacaagaactcttggttctttctttttctggtgatcccctaatataacaagcctaaattatcttggaacacccaggtattttcaatggctttctagaagtgatattagtcagagggaaagtgagtgaggctattactatttgagcactttcttccaaaatccacaaaatatatgttaatttggagtttttcttacttctggtttacaatgtcccttcccagagagtaagatttttaagcttttagtgaggctggaaaaaaaaatttttaaaaaagagaaataagctttcctgtattaggctgacttatcccagcggcagcaacaagcacagcccagacccaggaaaagtcttaataatattatctaatgtgctctggagactctttcagcactccctcaacatagggagaagaaaaacaaattttcctttgtcttatgatatgagtttatagattcttgttctctgtaactagtaacttcaagtattctgttttatctaagaagcacaacgaaggtcatgagaagcctgagcaggccagaactacagctgtctaggtaccggagtgagtgttatgagatcaaccagtgcaaggctctttagaacaaaacctagataacagacatctgggttgcatagcaatggtcatgtgtaatcctgagttatgaacctgttacaatttgattaactgtctctgtcctgcctccgtatccctgcttttgtgcactctaagcttgcttcaagctagcccaccccattttgggaagtgtgtataaaagtcaagcgctctctttgttctgtgcccagtctttggtcattgagtctgctgggtctgggtgtactcagtaataaaaatatcctcctgtatacaccccaagatctctctctggtcctccagattctgcaacatttcaggcagattcacatctctaaaaggccagcaagttctggtcaatcccataatgaaaatcctttaatgagacttggcaaacgtgacaataagagactccttgtataatgccctagagttggattagacacactgtgagctcttgggtggtggttctgaataaggcagtttgtgcagcaaatgcaaacacatgcatgggatccaggcaggaacaaaagcttccctttacaaagtgggtgggcatctggagggagccctcagaggtgggcagtggtcgtccttgctgactgcacattagccagaggcgtgaccataattggtcttgcagggaaagagcaccactgaggtcataggttatgaaaatgtttgtcatcctccagtgagcaagtccatctgcttgcttgtgggtgtcaactccatggtggatacactctgggagatgacaagatgcacacaaacctcctctcactaattatccactaccacacactcaagaccaacctttgctccagaaaggaatacgtgtctgtggaaatagacagagcttaagtattttgtaacctggtgaacatactgtgcaaaaccaaacgtttcaggaagattagctcagaaatgtttatcaagtgactgaagggcagtggcgggtgaggtgatgggacagcctcagggctgcacatgaggagggctccctctcccatgcaggcttttcctccaggagctgcaccaggaactcaaggaagatcagggagaattctgagaacaccctgctgtggagctgcctagagaagaagaataaatgatgaaaaatacaactctgagtaatgcatgggtttttgttcatgaaaactctctctctgaaagcttgtgaaggtcttgaaatacccctgattagctgaagacaaacatttaaaccctccttccacagggagttcaagcaggctggatgtgtccttctatggatgatcttcctcagccccttcctcttcccagctcatcactggctctctgtgtaaaaagttctcatcagcggaatgtggttgatgaagtgaggtcttcaattttctcatcttctatgtggtcatgttattttcctcatctgaagtttaaaaactcacctgcatgcagcacatgacaggctaaaatctcttgtggacaaaacagtaacaaaggcacccaccatggttgagcatcccgtgttgctgacaacgaccaccaggggtcaacgtcctcttcacaatcctgtgtgagagcagcacttgagtgatttcaataacaacttcccaggagaatcagctgaaaactacttgtcccattttccatacagatataacccctctattttcctgaagaaatagaaagagctgaatgctgaatacactgaatgtctgctggttttgcaagtttgtgactatatcactttctaatttctgacctgtgcagaccactgtacagacttttctcactggtgggaccagccttccagatgtcaaatataactgagcttcttcatataaaagtcaacacaagctcctcatggtttcagtgctcactgaatggagttggaaataaaacccacaattatccataacacaaattccttggaagttattttgggataatgagttcataacctgtagaccaagagtccaagagtgtttctattgaagagcctgggggatcaagacaccaggcaggtgatgcagacactgtctaaagagtgcccagcggctctcagagggacctactggatactcacgtgggacatcagcaatcactttctcagagtcaccagtgagctgtgctggttcctgaagggtccaggatagggccaaggcacctgctctgtgtcgtggagagtgattgttccagaaatcatagaggtggtctctatgcttataaaatctatgttcacagtgagaagtctgttctgagagggcttattcttcagtgaaaggacctctgcccacaaatgttcataaatggagcagggcattcatttcctcaagcaggatcagggcttgagtcatcagcatctcactcttgcaaggctgatgtgtcgtttgtcttccctttcttatcatcgaccaggctttgagctatgaaatgccctgtctcatcaatatgcaaataacctgagatcgactgaggtaaatatggatatgtctgtgccctgagagcatcacccaacaaccacatccctcctctagagaatcccctgaaagcacagctcctcaccatggactggacctggagaatcctcttcttggtggcagcagtcacaggtaaggggctcccaagtcccagtgatgaggaggggattgagtccagtcaaggtggcttttatccactcctgtgtcccctccacagatgcctactcccagatgcagctggtgcagtctggggctgaggtgaagaagactgggtcctcagtgaaggtttcctgcaaggcttccggatacaccttcacctaccgctacctgcactgggtgcgacaggcccccggacaagcgcttgagtggatgggatggatcacacctttcaatggtaacaccaactacgcacagaaattccaggacagagtcaccattaccagggacaggtctatgagcacagcctacatggagctgagcagcctgagatctgaggacacagccatgtattactgtgcaagatacacagtgtgaaaacccacatcctgagaccgtcagaaaccccaaggaggaggcagcttcactgaatgaggaggttacagggcttacgatgtttaaagttgttcagaaaataggctaagcaattgaggaatatgagtaatagaaatatgtatgcactctatacaggaaatatttctaataattgtcaccctatatgcaaaattcgcagagaggtaaaagcagaaatcagtcaagctgatgcaaagttccccacgtaggctttgtgcagatgtaagttctaaaatcagatagataaataatttggagcaagattgcttgataacatggctaatgctgaatatgattcctaaaaactggccaaaatatattccaatttgtctctgccacctctcttacataaaatgtattaaaaagtagttttaagaccacagcaaaattgaacagaaggtgcagagatttcctatgtgcccctgcttcacacatgcacagccttccccactgtcaccatcctgccccagagtcatcaataagttacaatggatgaacttacatggatggattggttctttcctcttccggcggtcccttggcataccaagtctaaactatcttgaagcacaacaggttcttcgagtgggttcctgggaatgaagccagttagaggaaaagtgggtggggctattcctattaggagtcttttttagaagactcataaaatgtatatgttcctatagattctgtgactcctgacttagtatcccttcccagacggtaagcttcctaaatgtttagaggcagatccatatctatggaaagaaagcaagttctagtgaatcccataaggaatgtcctttaatgagaagtggagaccttggtcatgaggcacatcatgtatgattttctataattcctttagattcactgtaagcttttgagggtgtttctggatgaggccctttgtacagaaaatgaaaactcaggcatgagttccaggcacaaccaaccaacttccttccaaagtgggagggaatagaagaaaccctctcctgtgtgggcgctggtccccctccattgctggctgcacattagccagaggcatgagcccaattagtcttggagggtgacagccccactggggttgctggctatagaaatgcctgtcctcttccagctgagtgagtcaacctgctcgcttgttggagtcaactgcatggcaggtgcactctggaagatgacaagatgcacacaaaccttctgtaaagtatcaattactacacactcaaaaccaaactgtattccagagacaggtgtctgcagggataaacagaatttaagcattttttgaatagggaagacactgccaaatgccatatgtttcaggaagtttaactcagaaatgttgatgacataactcagaaacgtgaggtgacatgacagcctcaggggctgcacatgaggagggctcacttccccatgcaggcttttcttccaggaactctaccaagaactcacagaagatgagggagattctgaaaacatcattctgtggtgctgcccagggaggaaaaataagatatgggaaaaaaaaactatataaattattagatttgttaatacaaactatttctgaagccttgtggaggtcctgacataagccatcattagctgtgaacaaatatctacaccctcctttcctggggagttcagttaggttgcgtctcttcttttatggacagtatcccccaacccctttatttcctgcacacctgctgctctccatgggacgagttctcatcagtgaaatgtggttgatgtagtgaggtcttcacttttctcattgtattagtcaggattatctagagggagaactaacaggatagaggtctgtatttgacggggagtttttaaggaggactgactcacacgatcacaagatgaagtctcgtgataggccgtctgcaagctgaggagcaaggaagccagtccaagtcccaaaacctcgaaagtcaggaagacgacggtgcagccttcggtctgtcgccaaaggccagagagcccctggcaaaccactggcttaagtccaagagtgaaaaagctgaagaacttggagtctgatgttcgagggcaggaagcatccagcatgggagaaagatggaggctggaagactcagcaagtctagtctttccaatttctcctacctgcttcattctagccatgctggcagctcattagatggtgcccagggaggttgaggttgggtctgcctcacccagtctactgactcaaatgttaatcttctttggcaataccctcacagacacactcaggaacaattctttgcatctttcagtgcaatcaagctgacactcagtattaaacatcacactcatcttctgtgttgtcatgttcctctcttcatctgaggttaaggaactcaccagcatgtagcacatcgtagcttaatgtctctcatggacaaaatagtggcaaaggcacccactagggttaagcatcctgtgtcgccgacagccaccaccacaggaccaagtctctctaccatcctgtgtcagggcatcgcctcagtgattgtattggcaacttccctcgagagtcatcttaaaaacggcttgtctcatttcccacgaaggtatagcccatccattttctcttcctagcaaaatggaaaaggatgaatacacggaatgtctcctggtcttgcaactttgtgactttattcctttctaatttctgatcaatgcagcccactgtacaattttttttttcactgaaatgacccacattctggatgttaaatataattgaacttcctcatttataattcagcacaagtacctcagagtttctgtcctcatgcaccactctaaacttacacaagttgtttatttatttgttttattttctggcatctctacttggcgtcttcatcatacccattttatgttatttctacaaatgattgttaaaatttataggtacttaattaaatattcaggaaacaagagaataaaatgaatgtaaaataaaataaaagtaaataaattaatatttaaaataaagaagccagcagctgaaagcaaggaaaatctattatgctgggtcagagagtatggagaactcatagtacaatatcttctgcacgttaatcattacttctactcaagttacagggtcctctctctttatatcagagctttccctaacatgtgcaatgaagactgaacacagattcctccctcaagactgacctagcatctctcactgagcctgagctgacaagtcatagatatcacatttgtctaagaaaataatgacaccctgtaaagttacctaccagcgatatggagacaatttgaataatataaataaagcctaaacttgataggtagtcatttatccttagaaggattgactgctgtctctacatgtgttttttatcacagagaagctactagtgccacagtccaagttgctgaatattttatttcctagcatgagttactacagaatgtgttcaacatgaaagaatgcagctgttgttaagggagaggagatgtgattatggaacacgagcagggatccagcagacattcctcttccacgtttgccccaaaacagagacaccagtaaaacgatgaaatgattgactttagtctccacagtctaatgtgagatttataccagatgttttctgccactgttttatagtagaaaatataatctctaaagaaattccatttttagagacaataccatcctccaggaagctgcaaatgcccataacagagagtattatagtgccttgtggccaggagctacaacacctgggtttggaaactaatggacagaaatatcaggttttcttgccaaatctatgatgaaaatttggagaatgtttctttccatctccataacaatatgttgtgatggagtggaggtcctggtacataagaaggtatgtgttcacagtgggtacagaattagacccataaaatgattgttctactggggttcccttgttgttggaccagctgaccaagaaagtgttgtaagaggtgtagtatttagtgaatactgtcatatttttgaaggtaccatatttgaagctaccaggagaaacagagatacatcaatctagcctagggagactctatgaatttattttatttccttcaaaatgaggtaaaaaattgcatcagttgaaatgccgatgataatcaagtgatgaaagacaacatccactcagtgttttaggtgtggtttaacccaaaagttatacaatatgtgagaacctgaactctggagccctggccatctctcagaagaatctagaaggtagactgagcctctaccacagtgtgatgtccatggagactggggatggctactgtctcaatcttgggatcacggaatagtcttaatatgattctgtgtgtatgtggatcattgtgtgtaagtgggaggattcctataactgtgtctgtgtgtttgtgagtgtctatgtttctgtgtgtgagcttgtgtgtctttgttttattttaaaatgagtaatttagtttctgatcattagactgtgtctttgagggagtgtgtgggagaatgtgcatgcctgtgtctgtgagttagtttgtaaaagggtatgttatattgaatgtgtgtgtctgggtccttcagtatttgagcctattaatttacatgaacatgaattttttgaaggtgtgtaagtataaaacttttgtaaatgtaattgtttgaatgctagtgtgtgcagagctatttgagtgtgaatgtgttacttgtattacttagtgagtgtgtgcccctatgtgagtttgtttgggtgagtcattacctatgactctacatatgaaggtgttgagggtgtgtgtgagtctgtgagcatgttttcattacctatgactctacatatgaaggtgttgagggtgtgtgtgagtctgtgagcatgtttatgtgcatgtgaaatgttgttatgtatgctttgaaagacttgtctcttgacctcaatatcatttgtctgaaaataccaggtatgtttaagcccttagaatctaaggaatagtttgttgtttaggataaatcctcaataagattaacaactgatttctcaccaaaaatcaggaaggccaaagctcactggagtggcatatcaaaagtgctaaaatacactatcaatcaaaaattccatactagcaagaacaccttcaaaagtgaaggagaaatcaagataatagaaataaacaaaagctatggagtccatcaaaaccacaaattcctaatgagaaatactaaatagagtcctgcaggctgaaatgaaaacagagtggagaatatttaaaaatcttacacctaaaagaacaacaacaacaagtatcccagtaatcacatttgtgtaatgaaaaccaatattgttttatttttgccttgagtctcatgttctattccttttttaaaaaaaaaatagatataatagtaatgacaaatttgaataatgtgcctataatttatggttataaaattcattataaatttgaataatgtgcatataatttataatgtatgaatatgtaacaacacaataagtgaaaatggatacagctgtagagaagcagagttgtatgcactattgaactaaggcaatcataatttaaactactctgttataaatctgaattaccaattgtaatatccaggttagctataaaaacttaagtaaaagtaaaaaaaaaaaaaaattagcaggacagctgactaaacgtgcctgacactcttcaaccccacatgaaataaccacagaaatgaataaacagctgagactagagaaattcaacagagttagatatcatacaaaataataaagcaaaaagcttacagctgaagaatttaatgaataaaataaaaatgcagtttacagattcaataacagaaaataacgagcaaaaataagaatttctgagcttgaagacaagtctttcaaaataattccagcagaccaaaaagaaaaaaaaagagaatgaaagagagaaggaaggaaggaaggaaggaaggaaggaaggaaggaaggaaggaaggaaggaaggaagataaaattttaaaaacatagaaaccctatagttttcaaaacacaatttgaaaacaagtttttgagttatggaaaatccaggggaaaattccagagggaaaaaaatgaaaatgatgtaggaaacatatttaataaaacaagagcagaaaacgtcccatatcatgggagatagatggttattcagatccaggaaactcaaatattccaaacagactgaaactaaacagatcctctctgaagaatgctttcctcaaattatcaaaagacaaagatagagcatgatagagtaggatagtatattcaaaatattgaaataaaaaagtatccagccaataatataatacctagaaacattattattcacaaactaacaaatatataatgtttatcggactaacatgaacaggaaatccatcacctccaggctggccttacaagaaatgctcaagattcttacatctggaagagaaaacataatagccacaattatgaaaaatttttaaaaaaccataaaacccactagtaaagccaatacacaaaaaagaaaataaatgaatcaaatcttatcactacaaaaattacaaaactacaaaaataaccaataggttaagaataagaaacaagagatacacaaaacaatgagaaaagaatcaatgaaagtgaaagaagtaagacctcttctatctattattagcttgaaagtaagtggattaaattttacatttaaaatacatagactgagttgaagagaaaagaaaagaaaaaaagaaacaaacaaacaaaagtgccaactataggctgctatgttaagcccattttgcattgttataaagaagtacctgagtctgtacaatttactttaaaaacaaaaacagtctacaaattcaatgcaattcccatcaaaatatcaccatcattcttcacagaactagaattcatatggaaccaaaaaagacttggatagccaaagcaagactaagcaaaaagaacaaatccggaggcatcacattacctgaattcaaactatactatagggccacagtcaccaaaacagcatggtactggtataaaaataagcacatagatcagtggaaaagaatagagaacccagaaataatgccaaatattatatcaatgaatctttaacaatgcaaacaaaaacataaggtggggtatggagaccatattcaacaaatggtgctgggataattggcaagccatatgtagaagaactatatcctcatctctcaccttatacaaaaatcaactcgagatggattaaggacttaaatctgagagatgaaaacataaaaattctagaagataacatctgaaaaactcttctcaatattggcttaagcaaagtcttcataaccaagaaccaaaagcaaatgcaacaaaaacaatgataaataggtaggacttgattaaactaaaaagtttctgcacagcaaaataaacaatcagcagtgtaaaaagacaatctatagagtgggagaaaatcttcacaatctatacatccaacaaaggactaatatctagaatctacgaggaactcaaacaaattagccacaacaacaaaaacaacaacaaaaaacaattccataaaacaataagctaacgacataaacagaccatcctcaaaataagatatacaaatggcaaataaacatgaaaaaaatgctcaacatcactaatgattagggaaatgcaaatcaaaaccacaatgcagatgcaagtcaataccacattactcctgcaagaatagtcataatcaaaaaataaaaaaatagatgttggtgatgatgcagtgaaaagggaacactggcgggaatgtaaactagtacaaacaccatggaaaacagtgtggagattccttaaagaaaaaaaggagaacaaatatttcatccagcagtcccattactgggatctacccagaggaagtcaccatacaaaaaagatacttgcacatgcacatgcatgttcacagcagcacaattcgcagttgcaataatatggaaccggcccaaatgcccatcagtcaatgggtggataaagaaattgtgatacacacacacacacacacacacgcacaccattttatatatatatatatatatataattttttttttttttttttttttttttgagacggagtctcgctctgtcgcccaggccggactgcggactgcagtggcgcaatctcggctcactgcaagctctgcttcccgggttcacgccattctcctgcctcagcctcccgagtagctgggactacaggcgcccgccaccgcgcccggctaattttttgtatttttagtagagacggggtttcaccttgttagccaggatggtctcgatctcctgacctcgtgatccacccgcctcggcctcccaaagtgctgggattacaggcgtgagccaccgcgcccggccatatatatataattttatattttctatatatacatattttttatatatgtacatatatacgtgtatatgtgtatatatgtatagatgtatatatatacacgtgtatatatatgtgtgtgtgtgtgtgtgtatatatttaccatggaatattattaagccataaaaaggaacaaaataatgacagtcacagcaacctggatggaattggagaccattattctaagtgaagtagctcagaagtgggaaactaaacattatatgttctcactcatacgtgggaaataagctatgaggatgcaaaggcataagaatgatacaatagactttggggacttggaatagatgaggggggctgagggataaaagactacaaattgggtacagtgtatactgttggggtgatgggtgcgccaaaatctcataaatcatcaccaaagaaattactcatgtaaccaaaccctacctcttcccccaaaacctatggaaataaaaataaaattatgtaaagtataataaaataaaggtatatttggctgacagttctgcaggctgtacaagaagcatagtactggcatctgcttctgtcgatggcctcaggaagttttcaattgtggcagaaggtgaaaaaggagcacgtatgtgaatggcgatagaagagaagaaaaggcagaaaattaaggttgttgggtgggtgccatgctccttaaacagccaggtatcatgtgaacgaatagaatgagaacacactcattaccacgtgaagggcatcaaggcttttatgagagatccgtgttcacgacccaaaaacctccctctaggtcctacctccaacaccggagataacattgcaacatgagatctgaagtgaacaagcatccaaactatatcagttacctacaaaaaactcactccaattgtaatgatgcacttacgttgaatatgaaggtatggaaaaagttatgtaatgcaaataaaaactaacttcacctggagtagctatacttgtagtggataaaccagactttaagttaaaagctgtaaagacagacaaagaaggacactatgtataaataaagagttcaacccaggaagaaggcataagaattttaaagatatatacccaacgatacagtacccaggtatgcagagcaaatgttatcagatctaaaaggatagacaccaatacaataattgctggcgacttcaatccctcactgaaagcattgcacagtttatccaaagagaaaatgaacagaaaatttcagattaaaattgcaccagaggccaggcacaataactcacatctgtaattcccgcactttgggaggctaaggcaggtggattggtagagagctcaggagtttgagactagcctgggtagcatggcaaaaccctgtctctacaaaaaaaataaataaataaaaaataaaaaacagccagtgtggtagcatgtgcctaaagatccagctacccaggaggctgaggtgggaaaatcaccagaacccagggagatagaggctccatagagccctgatggcacccatgcacgccctcctgggcaacagagcgagactgtatctcaaaaacaataattgcaccacagactgaacggactcaacagacacttacagaacacttcgccaaacagcagcagattgcacattctttttaacagcacaatgaacatcctccagaatttaatatatttggacacaaaaaagtctcgaaattataaaaatatcaaagccatatcaagtatcatttccaaacacaatgaaataaactagaaaccctagaggatggaatatttgaaacaatgcaaatatatgaaaattaaacaacatgcttctgtgtgaccattggataaaggaataacttaaaatgaaactttaaaaatttattgaaataaataaaaatagaaatacaatatagcaaaagctactggttacagctaaagcaatattaagagaaaagtttctagcaataaacacctaaatcaaaaaagtagaacgatttctcaaaaaccacccacctatgtgtcttaagaactagagaagcaagaacaaacagaattcataattgtagaaaaaatagacagtaaatatcagagcagaattttaaaatacagaaaaaaaaatctataaaggatcagcaaggccgggcgcggtgactcatgactgtaatcccagctttttgggaggccgaggggggcggatcatgaggtcaggtgattgagaccatcttggccaacatggtgaaaccccgtctctaccaaaatacaaaaaattagccaggcgtggtggcacacgcctatattcccagctacttgggaggctgaggcaggggaatccctcgaatctgggaggccgaggttgcagtgagccgagatcgcgccactgtactccagcctggcaacagaacaagactccatctccaaaaataaataagtaataacaaaagggatcagcaaaacagttgttttcttgaaaatgtaaaaaagcaagaaggcattatctagattaactacaaatgaaaagagaaaatgcccatatacatacaatcagaaatgaaaaaagagacatcacaatgataccacaaaaatacaaaagatcattagagggtattatgaacaactatatgctagagaaaattcaagaacctagaggaaatggataaattcatgaacacatgcaaactaccaagactgaaccaagaagaagtagaaagcctaaacagaacaatgaataacaggagataataataatgaaaagtctcccatcacagaaatgttcaggacctgatggtttcacagttgtgttctacttaacttaaaaaaaaatcatgaaaacagattattgttaaactattcaaaaaattgaagaaaaattatttaattataattttaatattatttttaaaatttcaacttttatttcaggtacagggggtacatatgcaagtttttttacatgggcatattgtgtgatgctgaggtttggggtatggatcccctcacccagggagttagcataatacccaatagtcagtctttcaacccatgcacctctctctccctccccactccagcagttcacagtgcctattgtttccatggtcatgtccacatgtgctcaacctttagcactcactttcaagtgagaacatgtgatattttgtttcctttttctgtgttaacttgtttacgactatgacctccagctgcatccatgttgctgcaaaggacatgattttgtttcttttgtgacagagtctcactctctcaccaggcaggagtgcagtgacgcgatctcagcttactgcaacctctaagtccctggttcaagtgattctcctgcctcagcctcccgggtagctgggattacaggcatgtgccactatgcccagctaaattttgtatttttagcagagagggggtttcactatattggccaggatgatcttgatctcctgacctcatgatctgtctgcctcagcctcccaaagtgctgggattataggtgtgagccaccacacttttttttatgaatgtgtggtattttatgattttatattgcatacataccattttattcatctaatacatcattgattggcacctagattgattccatatctttgctgttgtgaatagtgtggcaagaggcatgagtgcatgtgcattttttggtagaatgatttattttactttggctatatacctaatgatgggattgctgggtcaaacagtagctctgtttcaagttctttgagaattctctaaactgctttgcacagtgctgaactaatttacatttccaccacccatgtatgtgttcccttttcttcacttcccacccagcagctgttttttgtttaacttttttcatattagctattatgactggtctgagatggtatttcattgttgtttttatttgcatttctctgataattaatgatgttggaaatttttttcatgtctgttggccactgagattgacaggcttacaagtgtcttagtccagcagttttcggtaacaggctatccactttcattttctcttcctcacatgccccatttctgggttgtccatcccaaccaacagttactgctggagctgaatccactagcccgcttccatgggctgtcaggaacacattgcaagggtgacacacacgatgatccatctctgcagagccaactctccttctccagagattcatccaagaaacaattttgactatacctgagctctgtgacatctgaggacatggtttgtattactgtgcaagacaaacagtgagaggaagtcaatgtgagtccagacataaaccttcctgctgagaacaatggaaagcttttcttctaagataaggaataagaaaagaatgcccagtcttaataattctaatcagcatattgatgatagttttaaccatagaaatttgagaaagaaaaaaatagtaaaaggcatacaaattgaggggaataagttaaattgtttctgtttacagacaatataactttataaattccaaaaaaataaaaaattctgaaaaaacagccactgaaaactaacaaacaaatttagtaacattgcagtatacaaaatttatatggaaaactcagtagtgttactaaaaactaaaaattaactatttaaaaatcataagacaatgtcagttgcatttacaatattaaataacttacttagtggccatgcacagtagtttacacctgtaattcttgtactttgggaggtaggggagaatcacttgaggctaggagtttgagaccagcctgggcaacacagcaagaccaatatctatttctaaaaatcacttagaaaaaatgttggtcaaataagtgaaaatctgtgcattgaagactatatgacattgatgaaataaataaatctatatgcaaatatatgggaaactattccatattcacagattgaagataataatactgttaacatgtctatactacccaaagcaatctacagatccaaagcaatttctatacaaatgacattttcaacaaactactttttaaatgataaaattgaatcacaaaagaccccagatgtccaaagtaaccttgaatacaaacatcaaagcggggggaggtttcctagtacctgaactgcaaatatgctatgaaactacaataataaaactgcatgctgctgactttctaaataaactttaatattctgaattgaagttatttgacaatttcttctatcattttatctttactaaagtgttgcatgagtgtttatctagacagataatgtgcaaagagtcttcctgggtggtaaaatcccataagcgtctccaggagctccgagctctctctaggcttctcagtatgttcaggttcaagagacagaaagaattctctcagcccttcactgctttttgccctcttgacggtcagaagtccagaacatgctttgtggggacataatagaggggaccaaaatagacactttcagcaaacccactataacaagttctgctgcccatgggcatcttctccaggtacatgttggtcgccagaccctcaggctcacctacaccatgtggaggaggacctctacccacactcatttcagcacaactaccgtgtagctcagcatcagtaggtcacactacaatacattaaacatcactcagctaattacttattgaggttttcatttgtccatatgctatcaatattgggcagtttcaaatgacaacctagaggacttaatgatagttaaatttatgtcttctattatggaaaaacatcccttacctaatgacaggttcagctgtttttgccaagatggtgctcttccctggcctgctagtctcctacatgagaagcatcaatgaactgggcagcaccacacacttgtcaagtgatcactgggaatgatgtcagctacagaggatggggtagggttgctcatacctatgctccttacttctaggacacatcaggtgtctatggatttagagcatgtctgcaccctggtggactgcacactttacccagggagaaaggtctctgagtgtgggtggcaagccacctaggtgccaaggtaagagaccgagggcacaagctgttccagtataataaaatatataaaataagaatagttatactagatatagatcatagatatgattatatatgaatatcattaatcattagtttatagcaattactctttatcccaatgttattaataatcctcgctctataatcataacctaggaaaaaccaagccatacagagataggagtggaagggacatggtgagaagtgaccagaagacaagactgcgagccttctgttatgcccggacatggccaccagagggctccttggtctagcggtaacaccagcttctgggaagatgcccgttgccaagcagaccgtggtctagcggtagcgtcagtgtcaaggaaaaacacccgctacttagcagaccaggacagggagtctccctttccccaggggagtttagagaagactctcctcctccacctcttgtgtagggcatcagtcaggcccacctgagttatctggaggcctaatcatctccctctgatgctgtgcttcagtggtcactctcctagtctgctatcatgttccatcctgtatacctggctctgccttttagataacagtagcaaaattagtgacagtactaaaagtctctgatatgcagaaataatggcgtaagctgtctgtctctctccctctctctctctctctgcctcagctgtcaggcaggaaaggacccctgtccagtggacacgtgacccacttgaccttacctatctcattggagatgactcacactctttaccctgccccttttgctttgtgtccaataaatatcagtgcagccagacattcggggccactaccggtctccatgtcttggtggtagtggtcccctgggcccagctgtcttttatctctttgtcttgtgtctttatttctacaatctctcatctccacacacagggagaaaaacccaccgaccctgtggggctcgtccctacatctgagcttctcaatggaggtctacttctctatgagactagcaccttctgtggagtctcatgctgaatgtctccttcttgattatggtcattggttatgcagtgctgtaattagaaacccttacagaataaactacaaaacaagaatgatactaccttcttcagacatgacaattctacctaatgtgcacaactggacctattgaaatcttagccaggagaggatgcaggcataaagcagatgattttccgattgttccaccctaccgggttatattgaacagtggacacaggattcaacaggtaccgattattaatccagtgaggaaattatagaatagtcccaagtctaggcagagaagagtagctgaagacagtactttccctgcagctctgagattcactaaaatgtccagctctgtccctcactcgtgaatatcacagactaaaggacacccttcccacagcattggctctccatgaagatttgaaattgatgcccaggcctcagggtctgctgacagagctgtgacagtgggagtggaactcacacagagcaaaacagagtgtgttgcataataaggctgtacaacattttcataatggagggaatctcttggtcccaggaagatgacaatttaatatgtctcaggcctgtggagctctctttaggagctttgtgtgtggcttctttgtatactctggctccaggaactccagtgagggaagagattcgtcacctcctgtgcgaagggggctgaagcgaggaagacaagtggcctggcttccacagaacccataagctaaaacactccgagttcccttgactgcaagaaatgcagctgtcatcacggtttcaagtgccagagtctttaatgattatgtttcaactcatgagagtgccaggaaaattccaccagtatgaactactcaaatatgtcattttgtaacattacttcattgcttgctctcatatcctccatgtttctgaaaaagcaaagtttccatgctttatcatctgcaccaatgaggccatatttaagctatattttcatatgaacgtctcttgaagattttaaaatagaacaaatgttgaacaatatgcttaaaagaaaaaaaataaagaaagcagtctatgttgactcatgtgacattgataatgtatattagattatattggttgcttatttagttggtcatgggagaagagccttctttccagccaaagaatactaagaactccctcttctaatgacgaatttcagctgatcttgctgagaatatttagcaagaagacagaaacagagactcctaaagggagctccagagtcctgagatacatttaagttttcattttcctggaacccagagattccccactgttctacaagacaagaccccattctatgaccctgtctgaggagagctcaggggcagtgagctccccctcacattaccccttcaccctatgcccttggggctctgtccatgcaaataagtcccgggttcaagaacgaatagaggcagggctgtgagtgttatgctgtgtgctggctctgagctggggtctctagtagcactctccacatccatagatacatggcccctccgctactccttctctgcctgctggctgccctctgtggtgagttactcatgatttcatacgtggggagacacgggatgaggcaaatgtgtctgtgactcacagatgttctctattctcaggggttcacagtgaggaccaccttgtgcaatgggaggaagaagtagtggtccccttggtcatgctcagcctcacctatgccgcctatgcacattcaatttctgaacattctgtttcctggatccaccatctcccatcaaaaggtcttcagtgtgttggtgtgatatgggttaagggaaacactaagccccaaccttcagggcagagctagcatctccagaaacacatagtaaaaaacaagaaaacttacagctgagaagtgtgatggctggggaggcaggcgtgtattactgtgctcaaggcactgtgactcgaatccagagtgaactcagacacaaacctgccctgcaggggttcttgggaccacaaggggaaggatcaggtcaccagggtgtacttaggaaccactgaactgggtcaggcacaggaggtgggggtcagggctcctccccagggaagggcttttaatctccatgccttgtaaacctctgacaagccaggcagacacagacatatttttaaactatggaaacagatgtacctttcattttggaggaaaaagatcataagtgtgaaagcaaaacttaccaagggccaggtactggaataactgtaatctacataatcactctaagaattctaagaatttacaagtgcaatcatcctcatttcataaactcaccttaaataagagctttctaactgatcccatatattctgattttgtttatttcttcaacactttattatcttcaaggcatttcactgatgtcaattttagaagaatcatatgcaaacagcctctcgtggtggttgaaagcccacagcctcgccagtcctgtggatatttctggatgttctcagagtctccattgtctgtagagaagaattgtcccaatagttatttcacttttgtcttccacaaagttggaaagatggggatcactcaggggaatcgagatcaacaaacagaaagcctgaacccaccatatacaagataggatgtatttttttaggaatatattaattcccagaccctcaggctcacataccccatgtggaggggaacacacatccactccttcactcaagccaagctggccatgcagctcagcttctgcaggctcaggactgcaagctctccagtgtgggagtggagctaatgggaggtgaggccaagtctctgccctcacagagtctcatgatgaagatctgatgaaatatttccacagtaacatttctttggatatataaatgtagaatatattttgaaataatgaatgatgtatcttctgatggattcatgttggggaggcaatagaggaaaaataaaggtaattttaaatttctgctcccagctacagcacttgattttgatttagtgcatgactgtttgaaattttttgatgcagtcaacttcagcagcccagacctggaagcccagccaataaatgctccagattgggaaatttaaactgatgggagctgtttcatggaggaggaaaaatgctgagccagttgtgcgatcataactattgactggataatagaagcctgtgccctttctgccagtacctctggtccgaaacctgagctaatcaccctcaccaagttgagtaaacattgacacctatactaagtacaccttcatggtggtgcatgctcatggggccatctggaaagaaagaggccttgtctcatcaggaaataaggacattaaacacccaatagaaatggtgttaaactactagaggtgtgttctcatccttctcatcctccattatgcattgccctgagcacccaaaagatgactcattggcacctaaaggaaatcagactgcagaaaaggctgagaagtgagcagtgcaggatgcacacctgctatgagctttgattccacatctggagtttccatagttcaaactccattatactaaatagacaagaagcatgcctgcgactggggatttggtaaaacagatccagatttattctgaaaaactaatgcttatggattattcttactctccgaggccctggtctacaattttaaaacatttacatgagggcacacactccaaatgagattcccttgcagactttgtatgaccatgtgtcagaatggtcagaaaactgttcagaaagtcacatacgagtgtgttttgtgtgccaaaaatatctttgagactgaacaaaatctttgcaacgaagaggtacaacacagagaactgtgactcttggaagattggcaagtggattcactcacatgcctgtggccagtggcaactataaattcctcctgattgttctagatattgtttcaagatgggtagaagcatatctcaccaagtcccaaagagccacatgactggctaaggcataattcaaggaaatcgttgccaggtttggactcccatgcactatacacagtgacaacgatctttcttttatttcagagtttactcaaaaggtaagtcaagcactgcaaatcgaatggaaaccacagtcatcatggagaccacagtcagcagtaaagaaataaaagataacaccttgaagaagacaatagccaaactcaggcaggaaattgacctgcgttgggatagattttttcttattgccttgttctggggcagaacggtgccctgaagtgggcttgggaaaagtctctttgaaattatatataggaggcccttccagacctcttgccagtaacagcacctttagagctggtaaaagagcccagagttaaaccatatgtgcagattggtgcagaccttgctaactgcacatcagcttgctatttccaggcctgtttattccacagtgagcctcttcaccccttccatccaagagacaagatgccactacagtcttgtaaaagtcaaaaacaagatcagcagctgactgaaaggtggaacagaccccatgatgtgctactgattaacctttgttcagttaagttatccaatgtaaagccatgggtgcatcgctgttggaaaaaacctgtcccacctcaatttgaccccagataacagactacctggtcacataagcctaaggaaaacctgaagttgctgataaagaggagacaagaagacagataggtaatacccttctgttaatataaaattcttaatgagttctatagttataagtacattatttctccttattaaaactaatcttttttgctgaatgggtggaagatggtggcttccctgcaaaagaaaacatagttggttctgtaaagagtttgcccatttcttccactataggcctgccctggcataatacaagctcccaacgtaagaatttatgattttccatccattggagaagccatcttttccatctattataaaaacagaagacacttcattaatatcactcccactataggctatgccatatccagtgaggtaggatggctgacagtggtgcgaatccaagtaattggtcaagcactgctatgtgtgaagaaacaccacagcatactctacactgtcactcatgatatggaattgttgcctccttagcaatgtaactgagcccttaatatgtggctgggatgacaaggcaatgccagcctgcagagtggaatctgttcttccctctggggttagctacagcctgtggcactcatggctggccctactttccttacaactggactaaaagaagcaactggatatgaccttatatcccaggatgtaactgtccaaagtgcattctctttatgtcaactggaaaagtgtgaaagacagacactactgacataaacagacatcctagttgttctgcccactagccagctcttccccccaggtggcagtcatagatttagaattgcaagtagaggccctggctaagcaaaccaccagtccctttaacaacacctaccatgccatcatcattcttactgaagaaacctcacagatttgacaagtgacactatgaagctatatgaccctaggtattgcaactacagccaaaggtaacacttgtgtattaatgaacactgaatgttgcatatatatacaagattagtcccacaatataactcaagctatgcaagcattagatacccatatttctgctagagatggatgccctctctcagaaccccatgacagcatggtttagttgacttcctaacacatggaagagtttcatatatagtagagctggtattctgttcattgctatcttcaattgctatggattttattgctatcttgcactttaagtgagaatgtaatactgaccttctcaaaaactcctaggtccttgcaccataatgctccaacaaacacctactgtaattccggagactccagaatatttccaactccagtttaatggattcccttccaatacatacaacctatgccctttctaaagaagtagccagaatgactatgacacatgttttccatagaaacgaaatggaatttgacagtggggaatgatatacaggcagcttaatttcaaaatgcattttaaacttagtatttgaggttttaatattattttttatactccctgaaacctgaaatttcacacttacattttaattcagacttaatagcaacaaataaccagaacacatgaattgcctgtaatctctataccttgcattgtaagccacatttcaagtgtaaccttacttgtcagcacagtatgtttaccacaggcataattgcttgtcctgactgtccagaaggcagggtggtattaagtatgcggcctctggagctgggaagtctggctttgtataccgtctctgccactgctaactggaggacaatgggccagttacttcctgtaccccagttttctcatatgtaaagtagggttgttgtaagaatgaaattagttaatatttagtacctaacaactaataggcattacatggtagctattggtattgctatcgtcagagaacacacaggagtccattgttatttttaccctccccctccaaacaaaatgtgtaagacactagacatggtagctctgtaacggggttcgtcatgtattaaactgtgtacccaaatgatatgtcaaagtcctgacaaccagcacttcagaacacgtccttatttggaaatatggtagctggagatgttattagtgaagatgaggtcttacttgagcagggcaggccctcaatgtgggaagatgggtgtctttctaagtacaaggaaatttggacacagagacagagacatacagtgtgccatatgacagcagaggcaaagatcagagtggtgcagcagtaaaccaatgcatgtccgggattaccagtcacctccacaagtgaggaaagggcaaggaagaattctcctgagtctcagagggagtgcagcccagctcacacttgattttggacttctagtctctagaactgtgagagaatacagtcctgtcatttttaagccacccagtttgtagtatttcattttggcagccctaggatattcatacagaattcttcacccaaaaggaagcactctttcacacaaacagtcaaagtcctggatgacagacaacctggagactgcaaacctccaaggaatcaaaggaagttctataaattctaggggccccatctttcaaaggctgctcctcaagtccacacccacactttggaaggagaatcctgctcttggacatgggatccttagtgagccaactgccaataatccaacatcgtcatgaattaaagatctctgacatttcctcttcaccaaggggaattctgtcaagtagtaagtaaaacccttcttcagtaatctccacaccaaacagttctgcatggcttgggacgcctcaggaaacttataatcatggcagaagaaaaaggggaagcaaggcagtcatacatggtggcagaagagaggttaaacttttctgtctctcttgggtgtaaagatataatcttgaggcaaacagcagaatcaattttcttacgccttgaaatagactccacctttctccctttcaccataaatattcccttcacattaatctaactttatgtttgcatcgaactatgtgcctttttggaagttccggaagctaatttgagacagatagacaaagtcgggagaccctgatgcagaattccagaggtgacttcaatgttgctagttaacaacccaggcattgcccagatgatgccagcccaagatctaggtggactgggatgccagagagccgccagaacaagacgcacagacctggttctcagcccaaatcttgcatgcctttcttaccaacttttccttttttaaacccctgcctttccttcaaaattcaagtggttgcttgggatgggaatgcggtcacttcccctttaccattatggttaatacaataatctttgtaccagatctctctcttgttaattggatcctgcaggtggcagattccggaccagagtgaggttagaaactgaatgcacatactgggtggttcacagacacggtgttctgtgaagtttatgggtggattcctggggaagcctgcaagcctgttagtgattagcagaaccgcatccagctactgggatctgcacgccaggtgccgtgagcccctcaccatgttccctggtcccagctgcccgcggatggttcagccttgacaacgggctcggtgttctgggtggtgggagagcaagggggccccttgggcagcgtgctacagggctgtgaatccaggggcccacccggtgttccctgtggagtcactgagggaatgaggggcttctcagggcacagagctgtgccgcctttgtgcagtggtggctgaatacagtgacactgggcgcgtggtgagaagcggggcaaggtcagttcactggaccctccgccctgagcctcagatgagtcgggggtccccagacaggcccggcctctgccctgcggcggacactggagcctttgctgtggctgccaccgaggagccttgacctcaaagcagcgggaacctctctacccacctcggaaacctgaaggcagcggcggcctctcccagccaggacctcgccggcatccgggtctccaggcccaaccctgtaccacataaaggaagtccccgctgagctaccggcgggacacagcgccgttgggtgggcgggcgcggcggggcgggaagcacggagcagctgccacagagatgcgcgggggctgtcgggaagtgggcggtccgggaggcgcggggctgatgggacgtgggcggtccggggacgcgcgggggatggcgggacgtcggcgatcggagatgccagggggcagctgggacgtgggcggtctggagaggcgcgggggcagctgagatgcaggtggtccgggacgcgcgggggctggcgggttgtgggcggtccagggatgcgagggggcagctgggacgtgggagttccggggacgcgtggggtcgccaggaagcggggtctaggacttagatccgctttctcttcaggccatgcagccccgaagctccgaatcctgggatgactcctgtccatgttggaagggaccctgccagtcctggcaaggttcaaaggccttagggcaagaaatgttagtagagtcctggaagacgatgtggggaacgggtagcggccaccggatggtgatcgttcttctacaagaccttgacatggatggggagaaacagagaagaaccttccaagtttgtcccactggacatgcccaccacactttaccagccctttctagaaggcctgtgcgtaacacatgaaaaagctccgctcgacctttccctgaccttttaaaagaaaacatttgctgcatctaatccgcctagatataaggaggttcccaaatgtatgacagagtcagaaaattacatgtcttgtaagttaccatgtgcttgtcttttgttttccgttttttttcgtttttttgttttttgtttttgagacggagtctcactctgtcgcccaggctggagtgcagtggcaggatcttggctcactgcaacctctgcttcctgagtttcaacaattgtgctgcctcagcctcccgagtagcttggattacaagtgtgcaccaccacgcctggctaatttttgtagtttttagtagagatggggttttgccacgttggccaggctggtcttgaactcctgacctcaggtgagccacccaccttggcctctcaaagtgctgggattacaggtgtgagccaccgtgcctggccgtaagttaccatgtgctttttaaaaaaatcatagcaaaggggtgtcttctggaaatgacattttgaaatggtgttattagaccacccctggaagggacacagtaaccacacgtccacgttcgttcagtgggtgagaggacatggaggggagacctgggcaggaagggaagagggttccatgccaggctgctcatatttagaagacattttcatatcattgtcattgttttcttgtgtgcgttttattcctcgctattgtatacatcattggaaattctaagtattcttttgaaatatctagtctttctagatgttctgaagtgcctgatgtatgttaaaattacaggtggtaaaataataaattttgtaaatatctttttgttaaaattcatatgcagtgttttattttattttgatgttggtggggggtggggaggatggccaaatccctgcttgatcaacacacattgcgtttgtgctctggttcaggggaggagagaggaggagaaagtgcagacttccaggcctctgtgcgcaccgggaggagagattaatgatcatctcttctgtctgtgtgtttgttttatttatctatggatatcctgtgtataaaggatgaacaagtcctatttataacatctaatcttttcaggtgttaagttgccagtgtatgacggaagcagcgttattaaacgaacgcagcttgtacatattgtgttaaaattcataaaaagccagtcttctgaaaagaacccttgggccctccctccgcagcctccggcgccagctgcaggaagacctggccaggggaaggcgggcggcacaagctgctgctggctgtggggaaggcggtggagcccaggcctccacaggctccccacaggctccccacaggctcgcgcggctctggtcgctgggctccgcacgggccgcgtgggggcgcctgctgggagcgaggaggcgccatcctggctcgcctgctccaggaggacgctctgggcctgcgcagatgcagttctccaggatgggcgcgggcgctgggggccgcgctccttgggctgctgcgcctccactgagccgcctgggtgtgaggacctcgcgccggcgcctccgggaaggacgcggagccgccgcggccgagcccagggctgcagctgctgcccgacgcccgcgagaaggcccttccgccaccgcccgcgggttcgaacttggagcagctgctgccagctgaggcgccagcggcgtcgggagctcctcagagtcagtgttttgtgctggattcggcatgtcctctgaaaactcgggaatttgtcactgaaatggtgacaggaggtgagaagtttttttagacgttgccttcgctgaccgggcgccgggctcaggcctggaatcccagcactttgggaggccgaggcgggcggatcgcttgagctccggaggtggagaagctgccttcgtggtaactgtggtcttaagttcagctgagaacgataaatggcttttccttgaattggctgcttttgtgatttctctcaggctcatctttcctcagttaaaaatccagtggtaggtgtagcttagagacgggaaatttttggttttgttttggctacacgtaagtcttggaaattattttcttttacgttccaatgtgagcaaatccagaaggatgtcagattaaacaccgaatttaacaaattcagccgggcacggtggctcacgcctgtaatcccagcactttgagaggccgaggcgggtggatgatgaggtcaggagtttgagaacagcctgaccaacatagtgaaactccgtctctactaaaaatacaaaaattagccgggcgtggttgtgcgcgcctgtaatcccagctactcaggaggctgaggcaggagaatcgccgagattgcgccactgcactcagcctgggcgacagagcgagacttcgtctcaaaaaaacaaaaaaaaaaatcaatcattggaatactgttgttcattacaattaatgaacgtttgatacacgcataaacgcactaaattcacgagtacatataagtaaaataagccaaaaaaaaaaaactacatcctgtatgatgacacttttatacattctacagaatagaaactgaagtgacatgaaggtcgggagttgaatggagaaaaggtgagagaaaagagggaggaaggcgttgcaagagaataagagaaaatgttgagggtaattgatttgttttctatcttaataatggtgatggttacatcaataatttccaaattgtacattttgtgtgttaattagaattttatattattcaagctattacaaataaatacctgtataaatttcttagggacggtgtaagggagatggataaatcacataaaaagtcagatatttctgaatgtacaatgaataacccttagctctatctctattttttggtaattctaaaatgcagcagttttttttaatgtttttattacaagaagggtttcttcaaaccacaccaggtatgcgtaactctgggataaagttggctaagggagctgtgggatccggtggagaggagcacaggtcccgatcctggagcccattcttgtcacatgtgagctccaggacacatctcatagctccctcatgcttctgggtttacattcacatctgtaaatggaggaccaatgggcatctgcctctaacaatgtattttcgtgtgttaagataatgtatgctaaatgtttaccacagcacaatcttttactaagaaattacattttttccaaatattatcattgtcttcaagccccaccacccactagaaaacttcatctgctctgtgccttgccctgtcctcagacatcctgcccaagagacttctatatagtaggagacatgcaaatagttccctccctctgctgatgaaaaccagcccagccttgaccctgcagctctgggagaggagctcaagtgccaggattcccaggtgttttcacttggtgatcagaacttaacacagaggactcaccatgttgtttgggctgagctgggctttccttgttactattttaagaggtgattcatgaagaactacagatattgtttgtgagtggatattagagaaacagtggatatgtgtggcagttgctgaccaggatttctctgtgtttgcaggtgtgcagtatgaggtgcagctggtagagtcttttttttttttttttttcactttttagcgaacatccatgggttacaaaataatgggttggcttttcttccaacactttacagacaccatcaattttcctcttgcttataaggttttaaccagaagaatgctgtcatcatctttcctgttcttttagaaggaatgccccctcaactcatctccacttgtctgcatgtatttctatttgtctttggttttcagcagttttaataagattcacctaaatgtgtgtgtgtgtgtcgaggggtgttatgctattgttctgtgttctctgagatgcatggattcaccgtttactctgtctccatttttgtgaaaacaattagaaaaaaagtcagtgtgagcctagaaacaagcctccctgaagtgggcactggaccacctgggggcgctcaggacccactgagcacaagagccagccccagggcaggtgcagaggggtgttaaggtctggtttcctgtcagccctgtggcttcctctccataaaacagtttcctttgtggcacatctctggattccttatcctttttttcctgtgaagtctgaagaagaaacatttgtcgtaacaagagaaaaactttctcatatgcaccaaaggcagagtcacctacagtcatttactcctgtttctgaatgtcaataaggtgtcaatgcttctgaagttaatcagctaaatctataaaaggtgcggtgtttaactcagcatggcagcccagctcaacagaactccaagggccagtgagcaagcaggcaggataaagtgcatgctgggcattggggcagagggagttagcatccagtgcaagagaagaaagcccccgtggtggtcattgtcaggactccaagcccacagttccaattgtaggtgatactgggcaaaggaagagagaccccaccaatggttagtgtggatttcgagtctgatggttccacactcacactccaggtgaatatgaaaacatttattaactctatttttgaggtgtctgctgagagcagcacaggcctctcaagaaatttcaaactggaatttcctcagtagacaggaaaggaggctggctcagggctttataatgatttggtggtggggttgggggtgcgtttctactcaggagaaggagattgtgtgatttaaacctcacaggggcatcagataagggagcttctgtgatttcttactagatttaccacatgcaggggataaggaggaggaagaataaaccttaattcgtcagcaacgaggcaccaaaaataggacctgacgctttattctccctagcagcttaagaaaatgagtgaaaaagagagagaagagtccactatgtgtgaaaagcaaacaggtctaaagaaaataaaaattttattactgtaagcacataataaaaagaaagagaagaatgaatgagacaggcaggggtgctgaatcaatgtcctgagtggggccttttcattatccacagttatcagttaattctgaaggtctcaggtcagcttcctgcttcaaaatatcacaggcccttacagtatatgtgaaaatcctcggtttgtcgttcttcactaaagtagccttataattagatgtacttctgaatttaatcttcagttgtgttaaataaaaaaaaacacaatctacaatttaggaaagtgagagtttatttttatcaaggtttacagccatcccatatgctggaaagcatagcttttggtaaagacgagagaaaggcactcccaggaagaaggggttgggcagaagctttatgctgaagggtttggctaaacagacataatcaacaggttacaggaggggctactgatgttcatggaggtggtcctcacacatgcatactgaacaaacatgtctgtaacgtatgacccctgttcacttaccagtggagacttagcatttaaattcattacagtcaggccctatgtgccaatagcagaagcagaaacacaaaggcactcagggtgcagcctctgtaaacggccagagccaggccatggtgagtggtctctgatcaggagaaaggtcctgatatcactctagtgttcaatcaaagctggggttatggcttgtggaacaggggtcagttcatcaggggatgggctgcaattgtcttcatagtgcttgtctcagtgccggtgcttactgagccgctagagaaaacgaataacctattggcagttagaagacagtttaccttttaagtgtgggagtgagtggcagaacccttgcctgacatggctttaggtcttgtttataatttgacatcttattgccacagagattctgttctgtcattcttttgatctctattttaacattagtgttggtcattgttgtgtctaaaccgcaaaggggagtgagtgtaagaggcgcgtctgatcttgtcatggctgggatctcagtttttaggcttttctggagtcccttagatgaacagatggactatttagtcagttggggcacttaggattttatttttgttttacagttcataaatatgaaccctagtattgacattgtgcatattcactgctgtgttgtggttaaaattacctggtaagattcccttcaaagccgttcaagagcaatatcctaccctgatgtttcttccagtaaataccattccctgttttaatgtcattagaggctattgaaaagatgtaggaaaatgatagcttaatctgtcgatgactggagtgggtaagatacagtcatcactttcaatgctttgtcatgcgtgcatgtaataggaagaggtgagctctgggggaaaatctctaaatgtatgggccttccagccaccaaatcataaggtgatgactgatgtctcactgagggacttgactataatgctctagtgctagggagagaaactttggccaaggaagttcaagattttcttaaggttttgacaagtttagttcaagtatgacaattttcttcaacattttcagaagattgtggatgggaatgatgctgagttatataagtaattctaatgccttctgtgtttagataatattataaagaagactgtttggtataatgacccactacaatatatatacttttagttgttacaccatttcattttcctttaggattttactttctaagttacatgaatcagttccctaaaatataggcgtgcatctaaaatttattcttttgttgagaatttttacgtgttccagaagatatgagaaacttctttgcgtgaagagcatcccaaagtcaggcactcctgtaaaacatgtacttaatccttgtctttggcttattgatgagctctgttgaccacaataaaacttctgtcatgcgggctgacttgacatcaggtagaggaacagattctgaatgtactactgaattgagtgcataacctccagtttcgttactgatgtatgattcatcagagatgatactagatcaaggatttcaatcggaatctaatctaaaagatgtgaataaactttcctaatttagatagtattactgtgagcacactgctagtattcagccatgtctcctgtctgtcacactgaattcacgctaactttgatctaaaagttaacacttgttctaatgttcaaatatgttatttttattctaatgtctctagattattatctgtggctattttaggcaagagtgaaggaaagcaaggttaactgactaaaaatgagaaaaagcacaacctaatgtaatggaagtcaggacatcagcatctccaggcttgtctatttctagagttcatgcaaccaggggatttcttttctcatttttacacaaagaaacacccaaattgtccatttcatctcccattgactcttatcatctgtctctgtcagtttgcttagaattttggcctccagcttaatccaagttgctgcaaaaacatgatttcattcatttttacagctgcatggtattccactgtgtataagtaccacgttttcttttttcagtctgtaactgatcggcatttagttttattgtatgtctttggtactgtgaatagcacagtgatacacacgtgagttgatgtgtctttttgttccaatgattggttttctcttggacatatacccagtaatgagattgctgaggggaatggtagctctgttttaaattctttgagaaatctccagattgatttcatcagttcttgggccaaattatattttcaccaaaagtgtgtaagtggtccgttatctctatagccttgcctgcatctgttaatttctgatctttcagtgatagcaattctgacatatgtgagaaagtatatcatttggttttgattcgcacttatctgatgactgaatatgctgagcatttttataggttagttggccacttctatgtttgtatttgagaagtttctgtgcatgtcctttctccatttttaatggggttatttggtttatgctggtgattaagttccctatgaattaccaccttacacacactaagataatcagcattcaaaaaagaaaaatgaatagaaaaacataaccacttgtaggtatagacatactgaatttggaatggtcatggcttgcatgttggtattgaaatgggacagcaactttggaaaatggtcttcacagaaaacctcataaatgtagctagtgtcaccactcacagaagtagatggagaatacaactcaagtgtccatcgactgccagagggatgaagacgccgcggtgcgtctgtaacccacagggatgaagacgccgcggtgcgtctgtaacccacagggatgaagacgctgtggtgctttaaaaaggagtgaagcactgacataggctgcaactcggatgggccttgtaaacattgggtgagtgaactgagggagacacggaagtctacatcctgaattgtcctattgacatgaagtatgcagaggaggaaaatccctagagacagatcacagggggtgagtggaggggaaatggagagtgacgcttaatggagctgaggttttcttttctgtgatgaaaatgttcccaaaccaaatactggtgatatttgcacaacattgcaaatgtgtaaagtatcactgacccgtacacttaatcgtggctaaaattgtaaattttatgtcatgtgtatctcaacacaatagaaatgagcaccacattttgtttagtgactcaacaacaataacatttaggtttaaattctggattccccaacagaaccagtgcttcctgctggagctggatccatcagcccccagggaagggactggagtgggtcaggtgcacaggtcatgaagggagcacaaattctaacccactcctcaagagtccagtcaccacctccagatctatgtccaaaaacagctcttcgtatggctgagtgacattagcaacaagcacacagccatgtttgtttttttgttttgttttggtgtgtgtgtgtgtgtttttgatagagtcttgtgtcacccaggctggagtgcagtggggcaatcaatcttggctcactacgagctccacctcctgggttcaagtgattctccagcctcagcctccaagtagcttggactgcaggcactcaccaccacacctggctaatttttgtatttttagtagagacagggtttcactatgttggccaggctggtcttgaactcctgaccttctgatccacccgactcggcctccaaaagtgctgggattacaggtataagccactgtgcccagccacaaacaagtatttttaagcaaaagacacagtgaagagacttcagtatgagcccacacacaaaccttcctgtgggagtttacagaacagcagtgggtgctgaggacagaagccagcacccaggaaccagcagggaaacccagggggcatttggcaccgcctgaaggctcaggaccattgtggggctcagtggtcaggcaggctcaaggttcagcctcagagcaggtgtagcaggcggggaaaggctctgaagacggagtttagtgtcaccttctcatttccactactaaacaccctccagcacatctattctaatgtgtatgggtgttcatgtgtttagagaatattatttatgttatgaatctatagccatcttgtgggtgcatcaagttaaccacttcaacctatgtggaccctgttcattaggaataagtccctgtatttgaggacctcacaaattaataattatgtagaatcactttctttttcagtctcctttccttcctctttctttctttctcactcacacactgacaaacacacggggtgccataacattaattacctgatgtattaaagaatattgattcatttgcaacttgaccagtttagctgttgttcatgttgttgtaagatcaggaacatgtttctcagctgtgtactcctctaagctgagcagcagctttatttgaaatacacagaaactgaaaacaatccaaatattaatcagcaccttcataagtaaacaaattgtggaaaagtcgtttattgggatagtacccactactacaatcagtaaatgttggatacgatcaacagcatggttcaattcacaagtacatatgatgagtatagtgagccaaagcacatacatatgattccgttttataaactgtacaaagtgaatactcattggaaattacataacaaagatcactaactgacttctccatagtaagagaagcgaaggtataggagggagaaattgtgagagacaaagagaaaattgagaggcgaattgatttgttttctctgtgaatggtcattaggtcaatgtttgtcaaatggtgaacatattgtgtgaagattatatgtctgtattacttcattaaagctattataaataaaagtctaatgtggtagaaaaagatgaagagagaaataaaaataatacaagaaaagtcatgaactcctgaatgaattaacccttagtttttctctattacttataaaaacaccaagatacagccaaataatatcacgatatcattataagaagagtgttttgtaaacctcactgggaatttatagctctttcctagagttaattttgggaacagttggatccaattgtgagaaatgcaggctggacactgagactggctcttatgagatgtgagctcttgtctatgtcacatggtccttccatacttgggggtttacattcacatctgtaaatgaaggaaacattgactctcaaagaacatatttcatgtgcatgtaaaagtatgaatgctagtgagaattaattacttatgaagtataatcacccacatccactcttggacacagcccactctgaggcatctgttacagaactcattatatagtaggagacatgcaaatagggtcctccctctgctgatgaaaaccagcccagccctgaccctgcagctctgggagaggagccccagccctgagattcccaggtgtttccattcggtgatcagcactgaacacagagaacgcaccatggagtttggactgagctgggttttccttgttgctattttaaaaggtgattcatggataaatagagatgttgagtgtgagtgaacatgagtgagagaaacagtggatatgtgtggcagtgtctgaccagggtgtctctgtgtttgcaggtgtccagtgtgaagtgcagctggtggagtctgggggagtcgtggtacagcctggggggtccctgagactctcctgtgcagcctctggattcacctttgatgattataccatgcactgggtccgtcaagctccggggaagggtctggagtgggtctctcttattagttgggatggtggtagcacatactatgcagactctgtgaagggccgattcaccatctccagagacaacagcaaaaactccctgtatctgcaaatgaacagtctgagaactgaggacaccgccttgtattactgtgcaaaagatacacagtgaggggaagtcagcgagagcccagacaaaaaccttgctgcaggaagacaggaggggcctgggctgcagaggccactcaagacacactgagcatagggttaactctgggacaagttgctcaggaaggttaagagctggtttcctttcagagtcttcacaatttctccatctaacagtttccccaggaaccctgtctagatctgtgatctggatctgctgaaactgcctgtgtcaccttcctcacctgtgactttgggggagctgattgtggacactccagtgtgtgggatttcttggtgacagcaattgtgtcttctgtctaggcatgtctagggctggccatcaggaagggcaggctggaatttttggaaagaggcgcacctgccatccaccaggaaattttgttgtcttttgttctgctagaattaaatcagacacaccaaggttaactagcactatcttcctagcttgagaaacttgatggcaggcttgaataacacctgtatgaagccatcagagcaacaactagattaatgtctgctagaattaaatcaggcacaccaaggttaactagcactatcttcctagctcgagaaacttgatagcaggcttgaataacacttgtatgaaaccatcagagcaacacctagaatagtgtctgatttaataattgagactatggtctagccaaggagacacataaaacatgatttccatggttggttcatattttatatttattaatagaatctggctggtattataaacagctttgccaaaatatatgtgttagtgttggtcttcggagaagcaaactctgtgactggattagcttcgtgtacagtttccttcgtgtacagtttccctgtccactcttctgagaggaaatgcagaggtggtggaaggggtctggggtagctgaatgcatgtgagggaagtcggtccctgagtgaaggagaaagggaggaggactgggtggaactttcctaaacttctgtgttgttctatgaaggtccagcaaggtcactgaatcagagtcgtgtcacaggttcccatcagggacccagtgactcccagcagtggctctgctcagatcagcgcagagcttgttcgtctcctgagagtggagcacaggacgtggctccaacaccagccatggcatggaagacagagagcagccctgggtgcctgggtcaggtgcattgtgctccctgcaggtggagggagggaagtgctgactcagggcccagagactgtgggttctatacagaacatacacttttacttcatttctgtggatgacatagaaacaaacatgcagtctgtaaacaatggtgattcctacatttgccccaattgctttattccttaattctgcagaatgtcctggcacagaattgcctttctcatgtggaattgtgacgtgtgttgaggatgtgtgatccctactttcattgttttcctccatgtacagagctcctaaatagagtacagctgaccctccttctacactgttgctctcctccccacagaaagagcaaataattacctgaggctgaatctgaggtgggatctgtcctctgaacctcagagcctgcagagacccccagctgcagattcatggagtcaggtgtttgtacatgtgggaaccttgagctgttcttttgtcagtgaacactccttaaaactaattgtgggttcagaattaggacacccattgatctatcacacctcagctcattctgccactcagaatctccagaaattcaggaaatggttgaatgtacatttttgtgacaaatttttctcatttcacttagttgtgagtttggttagcagaaagtgctaccatttatgggtcccaaactgatgaagctcatttgcttcaacagaagttaggaggctcctaaaacttctcatcagcccttctctctgcacttcatgtgaaattcagttttacctggaattctggtgtgttggtttagccagagttccccatcctccatgtctgattttcctgggtatctgatcagtttccttgcccttcaccatacctcggtgacgtctaatcaccctggcccaacatcaagaattctggcaggttggtttaagcaagatttgctgtgcccctgatgtttcctctcagtaattttccatcttccggaccccaccctgctgcttggctttaaatccccatgtttccattctgcatttggagttcagctgaatctctctcctcactgcaaaacaccattgccctgatcccgacacctaccatgaggaccctggataaagtcttccttactgtgctggaacaagtgtctttacttgatattttttctttaataaatctacctttagtgcttcctaaattgctcaaggaacctcgaaaaataagataagtgcgattatccattttactgtgtgtgtatgtgtgaatttcaatttccatgtgtggtgtccagaagtcctgagcacaaacagttttgcttctctgtccaattctttgcttctgaaagccaggagtcatcccaacattggtaaattggcgatttgtttttactatttagtgactgacatatttcacttaacctgaagcttcatgaacacattgatgaaaagtagatagaagacttgtttggaaatgccagatttagggtagactttaccacccacgtgtgtctggagatctccttaggattccaagaacagggtggtttttttccaccacaggacaaggatgagaacctccaagctgtgatgataaaggacaggcagggccatgtgtggacaaggatgggctgctgccacgtccagagtgttctctcctagcaacgccgccatctccttcctcacactgtggtatttgtcagatgggaaacatgcctagaatttatctttgacatatggatggaagcccaggctagaggcatttgacagcttatttctgaacctacttctttaaggaatgcccagatcccttgctctgcttcctggttcttaacccctttagctcccttccgctcctgcacccatgcactgcctctttacggccacttccccacacccttcactgtagcaccattttcttgggctccttggaaatatcacagctttggtttaactcacagatcaggcacactcatgggcccctccagaggttctcgatttccctccctcaggctcctccctggggtcctaacttggccatctctatcctctcttctcagcctggccatccacaatccatcccatctggacttgtgtatagcactgggttaactcagcaggtatgaattgttcaaaccctgcacattcctaaaaaataactaaaaaaaaaaaaaaacttttgttcatttattgctgttacctactgtgatgagatctccgagtccataaaatattgcacctgataacagtgtctgtggatgtctgtagccttgggacatgcggtacaagtttaatcagtgatttatagtgaatgtctacttttgttttgctggagagggctgtcgtctgagtattgtggtcagttccccaggtgttccatagtctatgattcattccccaaacacagccctggacaagagagctcagcggcactccccttgttgtcaacacttcacacaagccatcttacctcacagctgaacaattacacatgtgtagaaggctccactgtgagaggacacctgagagcttgtgcctggattctccagggcttcactccttgtgccttttgtctttacttattttaaattgtatcatttttctgtaataaactgttcctgtgaatagaacagttatgagtcctatgtttttactgatttttcagcctacaggtggcagatgagaactctcaacacagttgtgttagaagaaggatttcctagagagaccctgactcaatgatgatacatggctgaagcattgcatggaaaacgtaagtgttcaggtatggaatggcaaaatttgatacctggggagtgacagaatactacagtctattacagcagctgagctgaaatcggtttctggaggtaaatgggatttagaaattataaatccaactcccaaggagctggctcaatcaatacataatgaaatgtgaaatgattagaaatagcctacatatgcaatttccatctgtgagaactaagtgaaaatccaggagagagttggcagggagagggatactgcaccaacctcagattttgaccattttcatttagggctgatgggctcatgaccactagagttagcaattacactgtgataaaagataaaagcttcacaaactctacccacccagaagggggctcaggtggtgaaatagggagggtaaggcatgaaacgactgaaatatgggaggatagtgagatgggttctctctttttgagttttatcttttgcttctttactaatttttgttaatctggatttggagaatgactagtgtaaaagtggattctgttttgagtcccttagaatggaggagaatgtgtgggccaatgttgtgcccagagactactacagaacaatagtagatgaatgtacatgacccaaacacaaagctttgtggttgctgatgggagagctgcactgccctggcctactggataacagcttctccaaagtgtatttaccctgacaatggagattgcctttctcttttaagtgaaaaaaatggaacactacaataaagtagtggtaatgctgtgtgtgtatgtataagacattctggagtgggtttgtgataattgggatatgtatcacttatccttttatttgtataaatttatggggtgaaagtgccgttttgttacatggatatattgttgagggataaaatctgggctttgagtatagccatcatctggatggtgtatattgtacccattaagtaacttctcatcccacatgccactcccaccctcccaaccttccaagtctccaatatttcttattccacactctgtatccatgtgtacatattatttagctctcacttatatatgacatgtggtattcaactttattcttctgagttctttaacttaagatagtggcctacagtttcatccatgctactggaaaatacataatttcattccttgtctattattgagtagtaattaaatgtgtatatgtacatacacatgtatagtgtgtgtatgtgtggggatgtgtgtgtacatatatgtatatgtatgaacatatacgactgtttcctttatctaatcatttactaatagaaacttagtttggtaccatgtatttgctattgtgaatagagcagcaataaacatataaatgcaggcatctatctgatataataatttatcttcccttgggtagatacccagtagtgggactgctgaatgaaatattagttccaatattaattatttgcaaaatctccatactgttttccatagagcttatagtaatttacatttccactagcagtgtataagcactcctgcttctctgcatccttactagcatctgttttttgttttgttccatttttctttttgactgttttaatagtagcttttctgactggtataagatggtatctcactgtgtctttaaattgcatttttctgatgattaatgtcattgattattttttcatatgctggttgatgatttttttgtcttttgaaaaataaacattgtagtaatttgctcatttttaatgtggttatttgtgggtttttgtgttgcttttgtttcttgtagtttgtaaatattagctctttgtcagatacagagtttaaaaatagtttatcccattctgtacgctttcggttaagttttttgattatttgttttgctgttcagatgctttgcttcttatttgtattaagtccaaatggtctatttcggtttttattgtttacttttaaggttgtagtcatgaattctttgcctaggacaatctccagaacaatatttcctagaatagcatctgcaactttcagactctcaggtctcccagttaagtcttttatccatattggcttaattttggatatagtgagagatacgggtccagttttattctgctgcaaatggctgttcagtttttcctgcacaatttatataacaaggtgacctgttcccagtgtatgcttcttgtctagtttttcacagtcagtttggctgcaggcatttgactttatttatgaaatgtctattctgttccactcatctatggctttctgctagattgttacttgattgttacttgtgtataataatgctactggtttttgtatgcttttttcatttattctaaaactttactgaattaactcatcaattctaggagtattttgaaagaatattagtttttttaagtacaaaatcatattatcagcaaacacaaagagtttgacttcctcttttccaatttgagtgcctttatttctttctcttgcctaatttctctggctaggatttcaagttccatattgattaagagtggtgaaagtgggcatccttgacgtgttctgagtcttaggaggaatactttcaacatattcctattcagtataatgttgtttcggagtttgaaggtgatttatggagaatgagagatgttgagtgcgagtggacatgagtgagagaaacagtagatatgtgtggccgtttctgaccagggtgtctctgtgtttgcaggcgtccagcgtgaggcgcagctggtggagtctgggggaggcttggtacagcctgggtgggtccccgagactctcatttgcagcttctagattcaccttcagtgacttctgaatgcactggatccgccaggcttctgggaaagggctggagtgggttggccgtattagaaccaaacgtaacagttacacgacagaatgcgctgcatctgtgaaaggcaggttcaccatctcaagagatgattcaaagaacacactgtatctgcaagtgaataccctgaaaaccgagtacacggccatctattactgtactagagacagtgagggggaggttaacgtaggcccatacacaaatctccctgcaggggcgcgcagggccaactgggggcgctcgggacccactgaggatgggacaggtcccaggggcgggtgcagggggaggtttcctttctcagctgcaggaggcgggtttgtttttgcaggaatatggagtcttatgaggttttgatattttactatggttatttatcatgattttttaaaattgggatttgtgttttagtaatttttaaatttatatgtaggggtatttttaaaaattaagttttagggtacatgtgcacaacgtgcaggtttgttacatatgtatacatgtgccatgttggtgtgctgcacccattaactcgtcacttaacattaggtatatctcctaatgctatccctcccccctccccccacctcacaacaggccccggtgtgtgttccccttcctgtgtccatgtgttctcattgttcaattcccacctatgagtgagagcatgcggtgtttagttttttgtgattgcaatagtttgctgagaatgatggtttccagcttcatccatgtccctacaaaggacatgaacttatcattttttatggctgcatagtattccatggtgtatatgtgccacattttcttagtccagtctatcattgttggacatttgggttggttccaagtttttgctattgtgaatagtgccacaataaacatatgtgtgcatgtgtctttatagcagcatgatttataatcctttgggtatatacccagtaatgggattgctgggtcaaatggttatttctagttcaagatccctgtggaatcgccacactgacttccacaatggttgaactagtttatagtcccaccaacagtgtaaaagtgttccctatttctccacatcctctccagcacctgttgtttcctgaccttttaatgattgccattctaactggtgtgagatggtatctcattgtggttttgatttgcatttctctgtaccctaaaacttaaagaataaaaaaaatccttcaaaaataattcttcctaataatatgcacttattctcctaggttgtattaacatctgttgatatcttcaactacatagctatggcgacattaatttacatctgtagacatatgtgtaaatacacaaacttatgcatacatgtctagtcttttatatttaatataataaaatcattataaaatatgtcctaatgaatgaaacttaatgattaactaaatataaattatagtaatccattattcattgcaatgattctctatagtttacataaattggtatctatttgtaagcttaaatatagtgtattggtcattttaaaatggccaagaacaaatttcaaatgtccctgtcacacaaacacacacaataaggatttgaggatttgagttgatatatatgtcaattagctagattcagttattccatattgcattcataaatcataacatagctttgcactctataaatacatagtcaaaatttctcaattttcaatgaaattttaattatacattttttaatccgtcctaggtcatgatttttttctccctgtcaggatatgattagattgtcctgagaaactcattcagcctcctgcctcctgaaggcttcaaaggcttcaggaagtaagctcctggatgggcagaagcaggcaaatctttcatgtgcacaggacctggagcatctctctttggattaagccccctcctcaggattacagggctcttcatttttctcaacaggctgttgtaccagataagcacaaaaacttaatttcattatgctttgctttttttaaaaaaaaaaaatgaaggtaataattttaacaataaacatattacaacctgctacacatgagacccttcttgtgcttcgacctttcttctcaggagtttatatgtattacatatattcagtttttttctgagttggaatgcttattacagattattccccttattacagattactcttttaatttatctcttagaatgatttttcgagagcccctgcctgcccgcgcctggtggaatggagcggcgcctgggctgagccaggcgcgcaggggcctccgcacgtgccgcgccggtagcagacgccaagcgggcggacagtgagcgtgagaggccgggtcggagtggccgccggagcagtgccggggatggaagaacagcccatcttcaccaccggagcacaggtcttccagattgaccccaacaccaaaaagcactggatgcctgcgagcaacaggcggtcaccgtttcttacttctatgatgtcacaaggaacatctatgggatcgtcagtgtggacggagccaaggtgaccataaacagcacaatcacaccgaatatgaccttcaccaatgtgtcacagacgtctgggcagtgggccgacagcagagccaacacggtgtttggtttggggttttcctctgagcagcagctgacaaagtttgcagagaaattccaggaggtggaggaagcggccaagacagccaaagacaagacccaggagaacatggagccctcgagtaataatcccgagaatccgggcatggagccccatcttctactccggcatccagtgtcaacgggacggacgatgaaaggcctctcaggccgctgcagctgacacgcacctgcagtctgggaaccacaagctgaaggcggcctcgacgcagagagctgcccacgggaagaggtgggagatggagctgcagatccggcgggagagcgacgcccggctgcccacggcgctgcaggagtcggtggccagcgtggagcagaggaagaggccgtgagatccacagagaggagaagaacacgcagctgaagaggaagatcgaggagctggaggcggagctccgagaaaacgagaaagagtggaagtccccaaaagcaaagtaaaactactcctcagctcaggtgagtgcaactgtgtctctgagaagatggaggcggcagagagaggatcaaaacctggaagacaaagtgcgttccctgaagagagacactgaggagagcaaatccagacagcgccacctgggggtggaggtgaagagtttcccggaggtgctggaccggaagatccacaacctgcctgacttccgcccaggccttgcatactgtgcaccaataactagggctggccgaggcccaggcccctcctgtgagtcccaagcgtgtgtgcgagaccagatggcgctaggacgttccctgtgtgcgttgcttctgtaaatgcaggcgcagtttcttgtatttccaaaccaactgtgccgtccactcaccccttcccagaatagaaatctcttgtccaggcacagtgtctcacgcctgtaatcccagcactttgggaggtcgaagcgcgggaggatcacgaggtcaggagaccgagagcatcttggccaacatggtgaaaccctccctgtctgtactaaaatacaaaaaattagccaggcttggtggcaagcacctgtagtcccacctacttgggaggctggtgcaggggaatcgcttgaaccaggagagagagtttgctgtgagccgagatcgcaccactgtcctccagcctgggcaacagagcgagactccatctcaaaaaaaaaaaaaaaagaaaaagaaaaatttcctctcgcttctctggccttgtgaggttgtggacaactggaagattttgactcaggaatccagaactaggtctaccttcaacatttacacagtcaggccagggatgtttatatttttcataagggctgttgaaaccatatgaactgaaaaaaagcactttctaatccaaatattgatattctttacaccaggtcatcgggctccttttatcgaatagcattcagggtatttgaatgtccatcaggcgccaggcccagggggcacagggagaacaacattcctctccgtcaataacgagaggctttaaaacaactgtttagtggagacttatcgagatggcaaacaggtttctggtgggtacattttctggcctggggatcacctgcatccacgatattgccctctgccccccagtttgtatggttgcgacaatgttccttttcttggttttaatttctgagcggatgattgtggtgcgggaacagcacacagtgagggtgcctagcacaatgcctggtgcaaagtaggttttttataaacgtttgtgcggctcacacctgtaatcccagcaatttgggaggctgaagcaggcggatcacctggggtcgggagttcgagaccagcctgaccaacatggagaaacctcttctttactaaaaatatgaaaaaaaaaatagccgggagtggtgcatgcctttaatctcagctactcgggaggctgaggcaggagaatcacttgataccgggaggcagaggttgcagtgagtggagatcgtgccattgcactccagcctgggcaacaaaagtgaaattccgtctcaaaaaaatttttttctaaagccccactcaaaaccagggtattattagcagtgtaatagttggaccacagttgaaaatacattcaattcagttcatgtgctctcaaatatcctttttcgttttaaagttgttctcagttgtaatattactcaaaatattagtaatttatactaatgacacaggttacaatattgtatacataatttagtgacatttgattggaaaaaatacatgttccccatgtcttgagtattttttccttctctataaaatgtatgcttataattatttaagtttcagatgctagcattatctttttgatatctgggatttaattttagtaggtatactggaatgccttttattaattcatataataatgttcatattttagataggattttaatattaattttactatttactgaatttcaaacttttctactttttttgtttttatgagataaaattcacacataagaaaaaatgcatagatctgaaatgtgtcactagagagtttctggcaaatgtgaatacctttgtccccagcacctaaggtagcctgaagagcaagtctctccccaaaacatgcgtctttttctatgcctgtggtcaaatcctgcatggggaaaggtttcgatttctgacactatagatgtattttattctgctttgaactttatataaatggaatcaaacattatagactttttttggtaaggggctacttttctatttttgaggttaattcatgctagctaatgtataaaattagatcaacatattgtcgtttattcaattcatagacagactgtgatatgaaccaccaaaattttcatgtacatggaaagagagagagagaaagagaggaagcagagatattttatatctgagtcagtccattaagtaaataaatgacaatattttcatttatttttatgtcagtggactttaaatttgtgtccagtttatgaatattatatgcagagctgttacaaatagcttagtgtaagttttctgatgttctatttttattgagaaaatatgaagtatgtatttctttattctaagagtaagtttaatttttttcagtggtattgaggcataattgaaatatttttataatatatatgtttaaggtgcaccaattgatgttttgatattgtattagtccattctaacactgctataaagaaatgcctgaggctgaggtgggcggatcatgaggtcaggagatcgagaccatcctggctaacacggtgaaaccccgtctctactaaaaatacaaaaagttagctgggcgtggtggcaggtgcctgtagtcccagtactccggaggctgaggcaggagaatggcgtgaacctgggaggtggagcttgcagtgagctgagattgcaccactgcactccactccagcctgggcgacagagcgaaactctgtcaaaaaaaaaaaaaaaaaaaaaaaaagcttgagactgagtaatttggaaaaaaaaaaagatgtaagatgtttaattgacttgtgagaactcaactcatgcattgtcatgaaaacagcaccaggagtcagttctaaaccattcatgaaggacccacgccatgacccagtcacctccaaccaggtcacacttccacaattgaggattataatacgacgtgagatttggggtaggacacagatccaaagcatatcagatatacattgtaaaatgctcatcatagtcaaggtaatttgcatatccatcttctcacagagctaccgtttaattttttttaaatgtagagcttgtgtgtgtatgtgtgtctgataacaacacctaagacctactcttagcaaaaatcacttttacaatatagtattaaatacaggaacattgctgtgcattagatctccagaaatgattcagcttgcacaactgaaactctgtgccctttgaccgatatcacccaatttccctctcctcccaggtcgtgggacccagtactctactcgctgctatcaagaacttggatattttagatcctacatgcagatgacatcgtgaagcatttgtctttcggcatctggcttattccacttagcaccatgtcctctagctccatccgtgttgttgcaaatgtcagaatttcctttttttttttgaaagccaaatgaaattcagtttatatatatacattttctttatacagtcatcaatctatggtcattaaattctttcacaaatctacactattataaataatcttgcaattaacatgtatttgacatcataattttatttcctttgacgatataacaagaagtgggatcaccaggtcatatgatagctttatttttcaatttattgactaaccaatcttaccatacgatataaggataccctcttcaccacattcttgccaacatttgttatcttttgtcttgctgataataaccattttaagtggtgtgaggtgatatctcattgggctttttatttgaattcccctgataattaggaatgttgagtacctttttaggatctgtttttcatctgtgggtcttctgaaaaaaaatctaaccaggtttttgccctctgtattaggtcagttgatatttgctgttgagttgtatggttaatttatatatttgggtggaacttcttgttagatatataattgcacatagttttttttactgtgcttgcttttggtattaaattcaaataatttctgaatcaatgacgaatatttttccatgttgtctatgatttatggtttcaggttatgttcatttttagttgatttttgtatatggtgttagagaaggtctagtttcatttcattttttttttgcacatgcatgaccattttctacaccattgattgaggagactgtcctttcttcactgtgtgttcttggcatacaaaattaggaagacacataattaaaaaagaaaacatcagatgaatattcctggtgaacatagacctaaaagttctgagcaaaatactagcaaatagaatccagaagcactttaaaatgtgatacatcatgatcaagtaggctttacccctggaaggcaagtttcattcaacatccaaaaatcagtaactgattcactatgtaagcaaaataaaagcgaaaaacatagattatctcaatagatgctgagaaagcttttaatagcatccaacatccactcataataaaaaccctcaacagactaggcatcagaaaaatatacctcgaaattataagagctatctatgacaaaccacagtcaacatcatactgaataagcaaaagttcaaaccccttgagaattgaaaaaagacaaggatgccgtctcaccactcctattgaacatagtattagaaatcctagtccgaggaaccaggcaataacaaaaataaaaggcagctgatatggtttggatttgtgtccccacccaaatagcatgtcgaattgtaaccaccaatgttggaggtggcgtctggtaaaggatgattagatcatggggatgtgttttcctctctcatgctgttctcctgacagagctctcaggagatctggtttcaaagtgtgtggtacctctcccttatctcttcctcctgctgcagccatgtaagacatgatgtttcccattctgtcatgattgtcaggttccccaggcctccccagccatgcttcctgtacagcctgcagaaccatgaattaaattaaattaaagaattaaatatctttataaattactcactcctgtgtgtttctttgtagtgtgagaatggactaatgcagcatccaaatgggaaaagaatgcaatgtatctgtccaaactgatgataaaattctatacctataaaattctaaagactctgacaaaataattcaagagagataaacaactttggtaaagtctcaggatacaaaaatcaatgtacaaaagtctccagcatttctatatcccaaccacatccaagctgagagtgaaatcaagaacacgatcctgtcccacttacaatgctcacaaaaaatgaagtgcctgaaaatacaggtaaaaaacaaggtgaaaactgtataaggagaactaccaaacacagcagaaagaaatcacaaatgacagaaataaatgtgaaaacatttcatactcatggattggaagaattgatattgtaaaaattgtcatactgcccaaagcaatttacagattcaatgctatttacataaaactctcaccagcattcttcagataaatagaaaaaaaattctaaaatttatatggaataaaaaaaagaccctgaatagccacagcaatcctaagcaaaaagaacaatgccagaggcatcatggtactgaatttaaactacaccataaagtcatggtaacaaaaacagcttggtactggtaaaagggcagacatgcagaaaaagtggaacaaaagagaaagcagaaataaagctgcatgcttgcaaccatctgatatttgataaggctgacaaaacaagcaatggggaaaaaactctattcaataaatggattctggcagatatgcagaatgcaagagtgaaggaggttgggcagcttctacctagatttcagaagatgtgcatggagaaccctatatgccaaggaagaagcctgctgcaggagtggagccaccacagacagtgtctattaggacaataccaaagatggggaaagatggggtcggaacccccattcagagtccccactagggcacttcatagtaaagctgtgggaatgtggccacaaccctcaagatcccagaatggtagagtcaaaggcagcttgtcctctcagcctggaaaaccttctggcacttgactctaacctgtgaaagcagcaccatgggctgtgcccagctacagggatgatattcctgaggtttttgggaccccctttgtcctagtgtgccctggtggaagtacataaagtcaagagagactattttgtagctttaagatttaatatctgccttactaggctttaggtgtgtctagagcctgttggcagttcctttggccaatttattccttttgtattgacaatatttacccaattcctgtggcactattgcaccttggaagtaaacaactgtttaaaactttttttttttttttttgagacggagtcttgctctgtcgcccaggctggtgtgcagtggcgcgatctcggctcaccgcaacccctgtctcctggcttcactgcctcagcctcccgagtagctgggattacaggcgctcatcaccacgcccgactaatttttgtatttttagtagagacagggtttcactgtattagccaggatggtcttgatctcctgacttcgtgatccacccgcctcggcctcccaaagtgctgggattacaggcgtgagctgccacgcccagcctgtttaaaacattttgcaagctcatagctgcagagaaattgccttaagactcagaggagactttggtattttcagtcggaggttgaccaagtgaagagtttggtcactattaaaaaaactattaaaaaaaagatgactttgcaatctaagaaggacatgagatcaggacacaagagtaaaatggtatagtttagatgatggtccctgctaaatctcaaggtgaaatgtgattcacagcatttgcggtggggccgactgggaggttttgagacatggggaaagatccttcaggaatggcttggtatccaccccatggtaattagtgaattatttctgtattatctactgtgagatctgattttcaaaataatctagcaaccatcctcccctttcatgtcctccctctcaccatgtaacacagcctgtttcccctttgccttccaccatgactgtaagctttctgaggccatcacatgatgcagatgctgatgccatgcttctcacttagcctgcagaactatcagccaaataagccaaatagactagtacactgtccaaagcaatatacagattcaatgcaatttctattaagtaaccaatataattgattacatattttaaaaaaccataaaatttatatggaatcaaaaaagagcttgaacatcaaaagcaaccctaaggaaaagtaacaaagctggaagcaccacattgccggacttcaaattatactacacagatataataagaatgacatcatcgtagtgacaaaaaataaaaattgatgtaacacaacagacagcccagaaataaagccaaatatctacgaccacctgttatttgacaaaactgacaaaaaatatacactggagaaacaaccctttattcaataagtggtgcttggaaaattgggcagccacacaaagaagaataaaaccagacttctatctcacaatagacaaaaattaagtgaatatggattcaacacttaaaaatataaactgaatctacaaaaatacttgaagaaaatgcaaaaaaaaagttctctggacattggcctaggcaaataaaacatgactaagatttcaaaagcaaatgcaatgaaaacacagacaaacaggacttaagtaaaaatcttctgcacagaaaaagaaataatcaacatggtgagtaaacaacctgcaggatggtagaaggtatcatctcacctcagttaacatggctcatattaaacacacacacacacacacacacacacacacacacaaacaaaacactaaccaatgctcgtaaggatacagagaaaagaaaactcttatgcattgttgaggagaatgtaaactagtacagtcactatggagagcagtgtggaggtacctcaaaaaactacaaatagaactaccgtatgatccagcaattccactactgcaaatttatccaaaggaatgaaaatcattgtatcagagaattctgcaccccagtgtatgtggcaggacctttcacaatagccaagatatggaatcaacacaggtgttgaacacaagagaataatggttaaagatgatgtggtgcatatacatgacgaagtactcatcagccataagaaatgaaatcatgttgtttgtggcaatgaggatggaactggaggacattatgttaaatgaactaagccagggacagaaagtaatacaccttgttttctcactcataggtggatacttaaaaaaaaatggtctcctagaagtaaagaatagaacagaggataccagacgctgggaagggtagggtaaaggacgagataggcagagatttgttaaataatacaaaattagagctagggaggaggaatagattataatgatctttaccactgtaggatggatacggttaacaataatatgtagttttaaatagttagaagaaggatactgagtgttcctaacaaaaagaaatggtttgagatgatggatgtgctaattaccctaatctgacccctatgcattatatgtatcaaaacatcactatgtacctcatgaatagttacaattattgtctattaaaattatattttaaaataacacaaaattcattggcagtgacataaatggaggctctgggataggtgtggggataaagggaggctctgggatacattacaggcctaacatgtcagtgggcagaggagcttccattagctttttctatttgtagcactgagtagatgtgacatttctcaaagtttgccctacaatagagacctgagttccagggaggtcttgcaggcagctgtgcagatggaagaagcaggagtagagggttgctggcccattcaacaatagtaggatgattattgtgcatgtagagaagtcaacattgttttaagtagttgcatcactggatgacatgaaaaacaaatccagtggaaatccttaaatattattggtagtgaaactgttttgggtgaggaaatgttcactgaagttaagtgagccagtaaagctgttaagaactataaaaacattggattggattcagctttgtctgaatttaatgtgattattactggctcaggcaggggtcacaaatcaagatggataggtggtaccaaccagaaaaagccatggaccagaaagattcacagctgaatttattcggatgtataaagaagagttgctaccaatcctagtgaaactattccccaaaaattaggataagggactcctccctaaattattctgtgagaccagcattattctgataacaaaacctggcagagactaaaaaaaaagataactttgggccaatattcatgatgcaaaaatgctcaatgaaatactagcaaactgaccacagcagcacatcaaaaagctaatccaccatgatcaagtagactttgttcctaggatgcaaggttggttcatatacgcaaatcagtaagtgtgattcgtctcataaacagaactaaaaacaaaaccatgctatcaatggacatagaaaaggtattcaatgaaatttaacattgtttcatatccaaaaccctcaactaggcatgaagaaacatacctcaaaataataaccatctatcatgaacccacagccaaaatcatactgaatgggcaaaagctggaagcagttttccctgaaaactggaacaagaaaagcattcccactctaaccactcctgttcatcatagtcatggaggtcccagccagagcgtgcaggcaagagaaagaaaagcatcagaaccggaagagaggatgtcaaaccatctctgtagatgaaatgatcataatcccgagtctgtagtttggtgattgacattaatttggaaaaattgtcagtcatcattgctttaaatatttcttcttaacctttctctgttccttctctttcccatgttatacccttataattgtctcacaattcttggataagctgttctggtttcttatgggtgtgtatttgtgtacttgtatgtttgtgtgtgtatttgtgtgtttactttttaaaaaaaatatttctccattttcagtttgggacattgctactgagatatttttaatttcagatttttttcctcagccatgctgcgtctacatataagtccattgaaagcattgcttaattctgttacaatattcttgatatctacatttttttgctttttaagagtttgcatatttcgacttgcataacacaactgttcctggatgccctctgcttaactcatcacagcccttagcatatgagttatagcggggtcttaaattccttgtttggtaattccaacttacatgacgtagctgagtctcattctaatgcttgttctgtctcattacactgtgatatttttcttttagtatgtctcgtgatttttttagccagaaattatgtaccaggtaaaagaaactgctgtaaagaggcctttagcgatgtcattgtaagatgtggagagaaatgtgttccataatcctacggccatggcttactctagcaagcttaggcctttgaaaataaacccttacatgaaagtgaaaacataagtcttagatttggagaatttgcttgcaaatcaaatatttggaaaatgacttttatcacaaatgtacaaattaccttacaattgaacaacaacaaaaccacacaaattaattttaaaatgggcaaagatctgaatagaaatcgcatctaaaaataaatataaagagatcaacttcattttcattaggtatatgcatgtttaatattcaaaaaatactactatcttatgaggatgggtaaaatacacaatatagataataccaaatggtgatgaggaagttgaaaaacaggaacattcactctttgctggtggtaatgctgaaatggcacatagacatgtacagttaataatttagtgtatattacaaaacagctagaagagaagatttagaattgttaacacaaagaaataatcaatgatggagatgaaagatataccagttatccagatttaatcactgcatataataatcttttatcaaaatatataccccataaagattttgaactcatgtatctatataaattaggtattaaaaaacagcaatgcaggggaatccagctaattgcacattccctgaatgtaccctttcttgtcaaaaaggagttccagagactcttgaaaacgtagtgcagttcatgtgagaaatagaggttcagaaatgcctcattataccctcctccctttggaattcaagcacaactaaccagtatttttcattaaaacagatcttaagactcagaaaacagattctttgcagcagtaagataccaaattctaacctgactcaagaataggatcacatgacagagagcagaccttgaaaagaatcaaagacttttaccctaaaatatatttatttgacatattttaaaatcaccctgcacagttatcttttgagagagaaatttacgttctgtagcgaatctccttccctttccaggtctagttgttagattagctgagagtctagcatcttttaaatgtcatagtagaaaacatttgctatctactgcctctaacggtggccacataagagaattcatctacataataagaatcttgttctccaaaacccgttatcctaacctatgtagggaaaagagagatcagactgttactctatgtagaaaaggaagacgtaagaaactccattttgatctgtaccctgaagaattgttttgccttgagatgctgttaatctgtaacttttgccccaaccttgtgctcacagaaacatatgttgtatggaatcaaagtttaagggatctagggctgtgcaggatgtgccttgttaacaatatgtttacaggcagtatgcttggtaaaagtcatcaccattctccattcttgattaaccaagggtaacaatgcagtgcagaaagccacagggacctctgcccagggaagccgggtattgtccaacatttctccccactgagacagcctaagatatggcctcgtgggatggaaaagacctgaccgtcccccagcctgacaaccgtgaagggtctatgctgaggaggattagtaaaagaggaaggcctctgtctcctgcatgtccctgggaatggaatgtctcggtataaaacccaattgtacatttgttctattctgagataggagaaaaccaccctgtggctggaggtgagacatgttggcagcaatgctcctctgttactctttactacactgagatgttagggtggagagaagcataaatctggcctatgtgcacatccagcgatagtaccttcccttgaacttatttgtgacacagattcctttgctcacacgttttcttgctgcccttctccccactatcaccctgttctgccacattccccttgctgagatagtgaaaataataatcaataaatactgagggaactcagagaccggtgccggtgtgggtcctccgtatgctgagcaccggtcccctgtgcctactgttctttctctatactttgtctctgtgtcttatttcttttctcagtctctcatcccacctgacgagaaatacccacagttgtggaggggctggcccccttcaaacacagaaacgtttttctactgatttcagctctttaaataaaaagttaagtctttcaatcagaaaatctttgaattcacctgtaagctgtaatcccctccccacactgcctcacttgtagctcttttatctttatgaaacaaatcgacacatgtctcatatgtattgactgatgtctttctctctaagacattaaatttaagctgcaatcaagccactttgggcacacgttctcaagatcttctggggctgtgtcacagggcatggtcctcacatttggctcgaataaatctaaatattttgcaaagttgactttttcattaatagttcttacagaacctactctgtgctctttgttacaagcataaaatcaatatagtattagttataatagtattgggtataccacatattggcaatttcttatgaagttaggcatagactaacaatgggatcaagtgtaaatgttttaatgtatttatgcaagttattttgatatttatgttctgcagatacttctatcagatttattatatcagctaattatttgttttatgattttttgcattttttgtagatgataacaccatatcttttctaggcctttattgtagaaaattgtgtgaaactactcaggactacatttgaaagtccttattgcagtggctgccagaattgaagtacatttcctctgtagccaccagacacccagattcctccagtaacaccttaattttgtttcctgcttggctttgggctttagtcttgtgctatccagagagactctgtctttcaaatcccccaggtcattctaaagccacatggaccggacaattgtcaatgtggtgggaagggtcgcactgaacgggcactctctgtccttctgagggagccatactgcaggcagacatcacagtcctggctcaggttgtgtccttccaagtatccctgccctcctgcaggtgtgatgctgatccatgcatcttcctcccattcctgggtagagggtctccttgttttttcccagatcttcttccagcagccactatactatgtcttcccactgatgtcttcagcttcctcttttctgcccttcccagcaggatgaggcttttattcctgaagaaagagagaggaggtgggagatgaggctgttattcctgagagaatgaacagggctttggagcttttctttcttctatcccagtttctatgagttcctccagtaccagtaacacaaaggtgttagtggctttgcccctgcatgttaattctttagcaatgtagtggtgacagtggaggtgggtctggatgcatttcagctgcagttgctgtttttctttccagcacagaaccatcttgggagctacagggaagagctttttgtaatgtgtcctcaatcctgggagaaaagttttcaatagcaataggaatctctcagttgtatgttctctgagaatttaaacaataacttatttattatactcaattttaaacaatgtaataaatatgtctaatttaatcttgcattagcttatgtgacatttgctggccattgccccagataaggccattttctcttcctgtttatccctgcaagtgactgacttttgcaagatgtaaggtttcttgtttgccctataacatcaataatctgaaatattaaagaaaatgtgctaatttgcagatcagtaaggttagttgtttctgtaaaaatatatatgtttttttgagatggagtcttgctctgtcaccatgctggagtgcagtcgtgcgaacttggctcactgcaacctccgcccccttggttcaagcgattctcctgcatcagcctccatagtagctgggactacaggagtcttggcctccaaaagtgctgggatttctggcataagccatcgcacccagccaaaaataatatattttaaggggtgcatacatctccaggctgagtaggagatttatttgtagtactcagtaactggaatttacacaactattaaggagcattataaataaatagtaagggtgcactcattaactgtaatactgttcctcattagaatcaacacattctttagttcatgtcctttgcagggacatggatgaagctggaaaccatcatagtcagaaaactatcacagggacaggaaaccaaacaccgcatgttctcactcataagtgggatctgaacagtgagaacacatggacacagggaggggaatgtcacacaccagggcctgtcggggtggggagcaaggggagggacagcattaggagaaatacctaatgtagatgacaggttgatgagtgcagcaaaccagcatggcacatgtatatctatgtaacaaacctgcacgttctccacatgcatctcagaacttaaagtataattttaaaaacacattatttatatagaaccaaattactggctcacaagtaattatactgtgcagaaaaccacacaaatgaaattgaaactataagatttcacttgaacaaaatcttgaaaaatagatctaaagtaacaaagatgactgactcaatatggtgagaggaaaatgactgggaggcaggaatgagaggaacacagggaagcttttaagtgtaattcattggtatcttgattgttatttgggatgcacaggtgagcacatgtgtaataacatttttttcctttggagacattttcttgctttgtcatccaggctggagctccgtggtgacatcatagctctctgcagcctcagaccctgggtctccagcaatcctcctccctctgccctatctagctgggactacagctgtgcaccaccatgctcggcttcagtgcttattcaaccagacactttaattatgcagtatttattacgtggcaataatgcctcaataagggtattgcaaataagtggatggataatttgttcaattaagattgatggaaatatagacacttacatgacaaatgtatgacaatcaagaaaataaaactgtaggaaacatactttactttttgttaggtaatcgcaacagtgcatacacatcacaccatgttctcattacagagaaaaggttctgcaaacctcacttggtgtgacctcctgtatgctgggcttggttcagggagaagtcaggaccagtggttagaagcacgggcccagataaccagactccctctgaccaaatgtgagtgctggggacattgtacaatccatctgtgttttgctgatattttttcatctgtaacatggaaataacattgatactacataccatggtttctgtgcatatggaaaaataaaagatgataggtgcaaactttaaatacacacagtttatgtagatcaattgtacctcaataaaactgttttaaaataaaaattacaaaactataaattttataggttttaagggtttatcatagaacaaacttacaataagaaaccagaatttccaaatgctatcaatatcacaaatctcccccaggacactctcacatgctctgagccccactctctcctcaggcgtcccatcccagagcttggcatgtattaggagacatgcaaatagggccctccctctgcttatgaaaaccagcccagccctgaccctgcagctgtgggagaggagccccagccctgggattttcaggtgctttcattttgtgatcaggactgaacacagaggattcaccatggagtcatggctgagctgggtttttcttgccgctattttaaaaggtaattcattgagaactattgaaattgagtgtgagtggataagagtgagataaacagtggatttgtgtggaagtttctgaccagggtttctttttgtttgcaggtgtccagtgtgaggtgcagctggtggagtctgggggaggcttggtccagcctggggggtccctgagactctcctgtgcagcctcaggattctcctttagtagctatggcatgagctgggtccgccaggctccagggaaggggctggactgagtggcacatatctggaatgatggaagtcagaaatactatgcagactctgtgaagggccgattcacaatctccagagacaattctaagagcatgctctatctgcaaatggacagtctgaaagctaaggacacggccatgtattactgtaccagacacagtgagaggaagtccgtgtgagcccagacacaaacctccctgcaggggcacgcggggccaccagagggtgcccaggatcccctgaagacagggacagcccaaaggcaggtgcagatggatgtcaagagggtctgtggcttcgtctacatctaactgtttcctggtgagcctctgtatatttatttttctgtgcccactaatgaggttgctaagtttaaacacttttttttttgagatgaagtctcgtgcttgtgccccaggctggagtgcaatggcatgatctcagctcactgcaacatccgcctcatgaattcaagcgattttcctgcctcagcctcccaagtagctgggattccagacaactgccaccacgcccggctaatttttgtatttttagtagagacagggtttcaccatgttggccaggctagtctcgaactcctgacctcaggagaccctcccaccttggcctcccaaagtgctgggattacaggcatgagccactgtgcctagccaaaaaagacttcattattataggaggaaaaattctcatctgcaagtgtcactgatggaagcagaaaaattgcccaggaagtcaggtgaggctgtagacactgtcaacccaggatgcaaatctcaccacaagtgcaggagaaagggcagggggttgatggatcatcctaactaacgtatggtttaagctgagcccagcaagaccctcagtgcctccctaaccacagttgcccttcagggataacccatgtgctcaacagcagccacaccttagtatctccactgtgcagtcattgtctaggacaagctcccaggatgtggggctttggcacaaaccaggtcatggatgtcagagaggggcagctgggtgtctggtccataggctccctgatgttggagggttgagaggtgcattctctgggccaacatatactctagggatatttacttcagaacacatacttttatttgttggtttatggttaatggggtattcatcccttcaatcatttgtcctttgatttacaaaaacattccaatttcactttggaagtaattttattatgtgcaattaagtcattattgattatagtcacactattttgctactaaatagtaggtgttattcattctttctaactctgtattttgtacccattaaccatatccacctgttctctggcccccactagcctcccagactccagttaccatccttctaccatccatgttcctgagtttaattctgttgatttttagagcacacacataagtaagaacctgcaatgctttttttttcagtgccttgtctttttcacttaacatagtgacctccagttccatccatgttgttgcaaatgactggatctcatggaatacctaattttattcggttctttcatatgacgtagagaagcaagcatgcagtctacaaacaactgtaattttcacatttaccccaaatgaattattacttatttctgtgcagggtccaggcacatagtagcctttctcttgagggactgttaaatttagagtgagatcacttgtttctcatattatttgattcctgtccatgtgcagagatcttaagtaatctgcttctttctgcacactaactctgaccttctcgacaaaaagagtagagattttcatgtttcctgagtctggggtaggagttagtcctacacaactcagagcctgcagagacctcccagtgcagttttatagacacaggtgctttctcatggggggtgagacctccacttcctgtgattgctgctcagatctaactgtgatttcagatttaggacaccattaggctctcaaaccatttctattctaaaaatcagcctcatcatagaaaatggaaataattcaatatccatttccctgaccgtatttcatccttgtttttaatttggtgcaagtttattacatatttgcctgaatctaacttcagaatcaactgaattggtctagaaatctcaaaaattgaacagaagtggattttattatttttaccaaaatgtgtgtaggtagggtttccaatgtatcgtccagaacttgtgcatgctaacaactgtttttctcagtcaattatcagcctggtgaagcccttgcaaaccccctcactcacctgtgctgcctctggattctctgtcacaatcagtgcttcctgtaggcactggatggaaagcacaggagtgggtcaggtgcatacgtgatgagtggaggatgaattccagcccacttatcatgaattcagacaagcccacatgttcccacatgcactatatcttcagacaagcagatgtgtctgcacatgaattcttctttcagacaaacacgtctgtcccctcatggactcttgccacacacaagcacacgtggcttcttgtggactgtactttcagacaagcacacattgtttcatgtggacatcttcctcccacaaatgcattttcccctgagtagactcttctcccacaagcccatatgtccgcacatggacatttctcacagacaaacacccatttccccatgtagtcccttccctcagacaagcacacgtattcccaggtagactcttcccttagacaagcacagatgttcccatatgaacccttccatatgacaagcacacatgttcccatgtgaactcccgtataacaagcacacatatttcctcacgggctcatcactcagataggtctgcatgtccacatgtggactctactctcagacaagcccacaggtcctcacatggactcttctctcaaacacccgttctccattgtagactcttcccttagacaagcacgcattttcccatgtgaactcttctgcatgggaagcacacatattcccacagggactcttctctgaaacacccattctccattgtagactcttcccttagacaagcacgcattttcccatgtgaactcttccgcatggaaagcacacatattcccacagggattcttcactaagacaagcatgattgtctccactgtgacccttccctcagagaagtacacttgtctacatatggactcttctctcagacaagcaaacatgtccccacgtggactctttcttctgacaagcacacgtgtccccgtgttgttataatcattttctcacctctgtctcacaaagttccctgtcctccaagaataattttgacctctcacttctcattcacactatggtgattggtgcacagcattttcacccaagagaaatgcaggcagctctcagaatttattgtgatggaggcaggaagacaaacacaaagataaaacttgtcgctaccttgctgggctgtgttctgtgcagagtctctgaaggctgccctggggctgtgtcctaagctgtatctctctgattccactaggagaatgcacatagagaaattcaagctgaatggtgtcctgatccctgcctcattctgctattcttccctattcctcagaaattcacccaacattgccctctgtcttgtattgtctacattctcacagactctctcatagaacttcagcttcaatggtcagagccctggtcacttcttcccaactctccgcacatgccaagtgcacattagagactcaataatgaggctcaccaggggcagtagtagtttcatctatcacagtggagatgaaaatccatgatttaaaataggtttctaaaaaagaaaatatgtctcacatcaaacacaaatgagagaatgcaacggcataattcattttcaggtttttcatatgtaaatctcctaaagtgcataatttagtttttagtgtggttcctgatccatgaatccttttgccttcttcattatctttcattcaaacaaacagagaccatacccactgttcacagtgtagcctcatggagaacatcttcaccagtcagcccagtcagtgagtgaggcctttaaatccttcatgctaattcaaatttctggctttattcttagtagaccccaggttttcggggatgttgggttgtgccagcactcctaaataagggagatagaaattatttcctcaggcatcctcttgcaacatttggacaattggccatagtttgattattgaggtgtgatgcatcaaaataatgttagttcaatcttctctcaaccagtcattgaacattgaaattttgtaattatttatttggatatctctgaagtttacctcttgaatatttaagtcatattataaatagtttaagctgcctactaggtaaaatgatctgctgcagaattttgacttccttgctgtgcatttttgcatttaaattcaagtttctattactcgtgtgtctagaatgtaaaaatacgtcttacattttctcgaatttttcatttcactggagtttccagaagatgagaaaacctcccttgtgtataaaatacctggtaacacattgctcaatagtttcgttgctgagaccagctcagtcgggagaccctaacccagcggtgctagaggaattaaagacacacacagaaatatagaggtgtgaagtgggaaatcaggggtctcacagccttcagagctgagagccctgaagaaagatttacccacgtatttattaacagcaagccagccattaatattgtttctatagatattaaattaactaaaagtatcccttatgggaaatgaagggatggaccgaattaaagggggtgggtctggctagttatctgcagcaggaacatgccctaaggcacagatcactcatgctattgtttgtggtttaagaacgcctttaagcggttttctgccctgggggggccaggtgttccttgccctcattccggtaaacccacaaccttccagcgtgggcattatggccatcatgaacatgtcacagtgctgcagatattttgtttgtggccagttttggggccagtttatggccagattttggggggcctgttcccaacatttcctctttaatttttttctcctctcatattgtactgttataagcaatgagatatcaggacacatcatcaacactttgctaagaaatatcttcagctaaattcccagagtgtcatatactaatcctaattttaactaaggtaacataattaagatacattctataacaagtcacacattttatccagtatccagtaacatgtttgtgacagaaacaaagcaggtgcttcctctgcaaagggtcatctgaggtctgagttgagggtcacacaggtatttttctggtttacaagggtgggaacaacaacagtaataacgactctgaacagcactggcccttccttgaaaggttgcaggtaaagctactgctgctatatcaaattaacaccttactagaataaagcccagagggagggtccacatgctaggtcacagagtgaggagaaatggagctgtgctctgctctccacactacctacaagaccccagacacacgcccaggttctactgatgcaaggcatctacagtgcagttctaaggcacctgcttcctggggcagggagcatcctcctgtcaattgtgcacctgctccttctgcaagctattaagtgagcacttctattgccatgaattatacatgttctctctcttaacatgtatattgaacatgcttacttactttgcattttatttttctctgaaatacactggatgagcagaagaaaataaatcacacccctgatgctttccacacatacaaagattcctgaagacagagctgactgatatcctcaccagtagaccactgcctttcagagatgatcttggtattcaagttccagcaattcttgaagttaaagggcacctctatctcctctccactgctttgcacctcacctgatatcagctttctcattagaatgccttgtgtttaaggaatgagagttcctgtcacaggtgcaaaggcccaggttctcccgctggctccagtccagggctagggacacctgtaagaccatgatatcatctgatacataacctttacatcataagctttacataacttttacatacataacatcacacatagcattcaggatacacacatcagatcacctttacatgctctaacatgtaaagattaggaaagtcatcaagctcattcttatgtcaaaaaacatctgcacaatttgaacatcaacaatttttgaaatctatcaaggaattgaaattgcaagggaaattacccattccaaatactgaagatacagacatgtccaggatcagaggtgacactggctgaactggaaaagaacttgaagaaagcacgagttggtgagagcacacacatggtaaatgctatgaaagcctaaacggcagatgtggactagggtgagattcctggggacctacactccgtagtcttctgaactttccttcaaaatcttccagattctcaggtatacaatccaaataatttttttatgggtctgaattggggaggattaattaccgagaaatgtaccaagagccttctaaaaaaaaaaaatcctgtaggaaatgagattttccagaacctggaggaacctacagttccctaaagacagacactgaggagaataaatctcgacagcgccacctggaggtggaggtgaagagcttcctggaggagctggacgggaagatccacgacctgaatgactctcgcccaggcctcccaagctgggcaccgacaactagggctggtggaggcccgggatccccaccgtgagtcccaagcatgtgtgcgagaccagatggcgctaggacgttccctgtgtgcgttgcttctgtaaatgcagacgcagtttgtcgtgtttccaaaccagttgtgccgtccactcactcctttccagagtagaaatctcctctccgccgggcgcggtggctcacgcctgtaatcccagcattttgggaggtcgaggcgggcggatcacgagatcaggagatcgagaccatcctggctaacacggtgaaaccctgtctctactaaaaatacaaaaaattagccaggcgtggtggcgggtgcctacagttccagctactccgaggctatggcagtagaatcgcttgaacccgggaggcggaggttgcagtgagccgagatcgttccactgcactccagcctgggcgacagaacaagactctgtctcattaaaaaaaaaaaaaataggctttaggaagtagctcctagatgggcagaatcggtttaaccctgtgtgtccacaggatctggagcctctctctccttagattaggccacctcctcaggattacagggctcttcagttttctcaacatgctgttgttgccccaaataaacacaaaagcactttattttcttatgcttacctttaatttttcaaaacaacataaaggtgataattttaacaataaacatattacaacctactatacatgatacccttcctgtagttcgaggtttattctcaggaatttatatgtattacttattttcaattgctttctgatatgggatgtcaatgccactttattacagtctttattcttttaagttatctctaaaatctctaaaaattaatctttccaaagcaccactcaaaaccagtgtattattagaacttgtgggtgtaatcgttggaccaatattaagaataaattcttaatggactaactcagatataaaatttctgtccttcctctctctctacatatatacataacgactttgaggtttcagttgaatcagtccattcattgaatgtatgacaataggttgatctaattgtatacgttaaatagcatgaagaaacctcaacaatagcaaaagtagccccttaccaaaaacagctctataatgttagattccacttatgagaagttcaaaagagaaaaacatggatctgtattgtcagaaatctaaacatttccgcacgcaggagctgaccacaggcacaggaagacctgtgttgggggatggacttgctcttcggtctaccttaggtgccggggacaagagtattcacgtttgccagaaactctctagtgacaaattccagatctatgcatttcctcttatatgtaaattttctcataaaaacaaaaaataatgtataaaataatttaaaattcagaacataataaaaatgacattacatgcctatccaaaacattcagtaatgaacattattatatgaattaataaaatgcattcaaatatacctactgaaattaacttctggaaaataaaaagataagggtaacatccgtaacttaaaaattaataagcatatatttcatagagaagaaaaaggtagtcaagacatatgtggaatgtgtattcttttttccaatcaaatgtcattaaactatttaaacaattttttaacctgtgtcataagtatagattactaatatttgtctgatattacaatgtgaacaagttttaaagaaaaaaggatatttgacagcatgtgaactaaattgaatttattcttaatattggtccaacgattacacccacaagttctaataataccctggttttgagtggtgctttggaaaaattaatttttagagattttagagataacttaaaagaataaagaatgtaataaagtgacattgacatcccatacataacaacatattgatctattttttgttgatggactttaaatttgtttctagtttatgaatattataagcaaagctgttacaaataccttagtgtaagttttcctatgttgtctcatttttattgtgaaaacatgacgtatgcatttctttcttgtaagagtaattttaacttttttcagtttcattgaggtatatttgaaaaaattttttaaaagtatatggttgaggaacaatgcaccacttgatgctttgtcttaggccattctcacattgctataaagaaatgcctgagactaatttgaaaaaaagaaaaagatgtttaattggctcatgattctgcaggctctataggaaatgtagttgtttattcttctggggagactcaggaaagttagaatcatggcagaagacaaagaggagcagggcaatcacatggccagagcaggagccacaggaggcgtgcagcggggggcggggcgggtctacacaccgttagacaccagatcttgtgagaactcatgcactgtcatgagaacagcagcaggagttgttgctaaaccattcatgaaagacctaccccatgacccagtcatctcccaacaggtcctactttcaggaatgaggattataatataacatgagatttgggtcaagatacggatccaaaccatatcagatacacattgtaaaatgatcatcgtagtcaaggtaatttgtgtgtatatcatctcacagagctacaattttatttttttaaatttactgcatatgtgtgtgtgtctgatgagaacatctaaaatctacccttttagcaaaaatcgtttttacagtaaagtattaactataggaacattgctgtacattagatttccagaactcattcaccctgcacaactgaaactctgtaccctttgatcaacatcacccaaattccctctcctcccaggtcctgacaccctctagtctactctcttcttttaagaccttggatattttagatcccacacgtaaatgagatcatgaagcatttgtctttctgcatctggcttattccactcagcatcatgtcctctaggcccatccatgttattgcaaatgtcagaatttccttcttttcaaagcgtcataaatttagttttatgtatacacattttatttatacatttatcaatgtatgacccttaaattattttacaaatctacactattattaataatcttgcaatgaacatgtcttttgcataataattttatttccttttaatatataacaagaagtggaatcactagatcataagatagttttattttcaatttgttaagtaaccaatcctaccacatcatataaggattcctttttctccacattgttgccaacatttttaaagttttgtcttgctgataatagccattttaactgctttgaagtgatatatcattgtgctttttatttgaattcccctgataattaggaatattgataaacttttcattttccgtttgccatgtgtgtgtcttctgaaaaaaaaatctatccagaattttgccttttttaatcgggtcacttgttatttgttattgagttgtatggcttatttatatattttatttgaacttcttgtcagatatataattacacatagtttttcctgtgttttggtattaaattcaaataaatcagttctgaatcaatgacaggaagttttttctttttccatgttgtctatgagtttatggtttcaggtattatgttcatttttagttgatttttatatcatgttagaggaggcctaattttatttctttttatatggatgcccagtttttacaccattattgaaaagactgtcctttctctactgtgtgttcttggcacactccatcaggaagagacataatgaaaaaagtatataagatgaatattcctgatgaacatagatctaaaagtcctcaacaaaatactagcaaatagaatccagaagcactttaaaatgtaatacatcatgatcaaatgggatttaccctgggatgcaaggttcattcaacatccacaaatcagtaactgtgattcgccatgtgagcagaataaaagcaaaaaacataggattatctcaatagatcctgcaaaagcatttgataggatccaacatccactcgtcataaaaaccttcaacagactaggcatcaaaacatacctcaaaataataagagccatctgtgacaaactcagtaaacatcatgctaaatgagcaaaagctcaaacaccttgagaactggaacaagagaaggatactgtctctcactactcctattcaatataacactataaatcctagttagaacaatcaggcaggagcaaaaatgaaaggcagctgatgtggttttgatttgtgtccccacccaaatctcatgtcaaactgtaatccccagtgttggaggtggggcctggtgaaaggtgattcgatcatggggttgtgttttcctctctcacgctgttctggtgacagagctctcaggagatctggtttctaagtgtgtggcacctcccccttgtctcttcctcctgctcctgccatgtaagacatgatgcttccctttctgtcatgattgtcaggatcctgatgcctccccagccatgcttcctgtacaactcgcagaaccatgagcaattaaaactcttttctttataaattacctagtctcaggtgtttatagtctgagaatggactaacacagcatccaaacaggaaaataagtcaatccatctgtcttcactgatgatacaattctatgcctagaaaatcccccaaagtaattctagaatagataaataactttagtaaagtgtaaggatgcaaaatcaatgtacaaaaatcaccagcatttctatatcccaaccacatccatgctgagaataaaatcaagaacacagtcctatcccatgtacaatatcttcaaagaaaatgacatgcttaggaatgcaggtaacaaacaagatgaaagatctctgcaaggagaacaacaaaacactgcagaaataaatcataaatgacacaaataaatggaaaaaaacatttcatgctcctggattggaggaatcaatattgccaaaatggtcatactgcccaaagtaatttgcagattcgatgttatttccatcaaattattaccatcattcttcacagaattaaaaaacccatacatattctaaaatatatatggaaccaagaaagaccctgaatagccaaagcaatcctaaacaaaaagatcaatgccagaggcatcatgctaccagatttaacattacaaagtaagaaaaacagcttggtactggtgcaagagcagacacacagaaaaaaaaaaagaacaaaacagaaaacagaaatagagctacacacctaaaccatttgatatttgataaggttgacaagaatcaagccatagattaaaaaaaaaaactccgtattcagtaaatagtgctgggagacctggattcgggcagatatgcagaatgcaacagtgaaggaggctgggcagtttctaccttgatttcagatgtgcagagagccctatgtgcccaggaaaaagcttgctgcaggagtggagccaccacagagagcctctactagggcagtgccaaagatgtggaaagatggggttggagcccccattcaaagtccacactggggcactacatagtggaactgtgggaatgtggccacagatctcaagactgcagaatggtagatccatgggcaacttgcaccctcagcctagaaaagcttacagcacttgactctgactcatgaatggagccccaaggactgcgcccagcaaaactacagtgatgggctgccggaggttttggggagccaacacttgtcccactgtgccctggttgaattacataaatttgagagaggttattctgtaactttaagatttaatatctgctctactgggttatatgtgtgtgtggggggggggagcgctgttggccattcctttggccaatttatctattttggattggaataatttacccaatgcctgtaccataattgtaccttggaatacacaacatttgcaatgttttttttttttaattttgcaagctcacagatggagggaaattgccttaagactcagatgagactttagacatttgagttggaggctgaccaagttaagactttttgttattttagtattattatactttaagttttagggtacatgtgcacaatgtgcaggtttgttacatatttatacatgtgccatgttggtgtgctgcacccattaactcatcatttagcattaggtatatctcttaatgctatccctcccccatccccccaccccacaacagtccctggtgtgtgatgttcccattcctgtgtccatgtgttctcattgttcaattcccacctatgagtgagaacacgcggtgtttggtttgttgtccttgcgatagtttgctgagaatgatggtttccagcttcatccatgtccctagaaatgacatgaactcatcattttttatggctgcatagtattccatggtgtatatgtgccacattttctcaatccagtctatcattgtttgacatttgggttggttccaagtctttgctattgtgaatagtgccacaataaacatacgtgtgcatgtgtctttatagcagcatgatttataatcctttgggtatatacccagtaatgggatggctgggtcaaatggtatttctagttctagatccctgaggaatcgccacactcccttccacaatggttgaactagtttacagtcccaccaacagtgtaaaagtgttcctatttctccacatcctctccagcacctgttgcttcctgactttttaatgatcgccattctaactggtgtgagatggtatctcattgtcgttttgatttgcatttctctgatggccagtgatgatgagcattttttcatgcgtcttttggctgcataaatgtcttcttttgagaagtgtctgttcatgtcctttgcccactttttgatggggttatttgtttttttcttgtaaatttgtttgagttcattgtagattctggatattagccatttgtcagatgagtaggttgcaaaaattttgtcccattctgtaggttgcctgttcactctgatggtaatttctttcactctgcagaagctctttagtttaattagatcccatttgtcaattttcgcttttgttgccattgcttttggtgttttagacatgaagtccttgcccatgcctatgtcctgaatggtattgcctaggttttcttctagggtttttatggttttaggtctaacatttaagtctttaatccatcttgaattaatttttgtataaggtgtaaggaagggatccagtttcacctttctacatatggctagccagttttcccagcaccatttattaaatagggaatcctttccccattgcttgtttttgtcaggtttgtcaaagatcagatagttatagatatgcggcattatttctgagggttctgttctgttccattggtctatatctctgttttggtaccagtaccatgctgttttggttactgtagccttgtagtatagtttgaagtcaggtagcatgatgcctccagctttgttcttttggcttaggattgacttggcaatgcaggctcttttttggttccatacgaactttaaagtagttttttccaattctgtgaagaaagccattggtagcttgatggggatggcattgaatctgtaaattaccttgggcagtatggccattttcacgatattgattcttcctacccacgagcatgcaatgttcttccatttgtttgtatcctctttaatttcattgagcagtcgtttgtagttctccttgaagagatccttcacatcccttgtaaattggattcctaggtattttattctctttgaagcaattgtgaatgggagttcactcatgatttggctctctgtttgtctgttattggtgtataagaacgcttgtgatttttgcatattgattttgtatcccgagactttgctgaagttgcttatcagcttaaggagattttgggctgagataatggggttttctagatatacaatcatgtcatctccaaacaggaacaatttgacttcctcttttcctaattaaatatcctttatttccttctcctgcctgattgccctggccagaacttccaacactatgttgaataggagtggtgagagagggcatccctgtcttgtgccagttttcaaagggaatacttccagtttttgtccattcagtatgatattggctgtggctttgtcatagacagctcttattatgttgagatacatcccatcaatacctaatttattgagagtttttagcatgaagtgttgttgaattttgtcaaaggcgttttctgcatgtattgagataatcatgtggtttttgtctttggttctgtttatatgctggattacatttattgattttcgtatgttgaaccagccttgcatcccagggatgaagcccacttgatcgtggtggataagctttttgatgtgctgctggattcggtttgccagtattttattgaggatttttgcatcgatgttcatcaaggatattggtctaaaattctctttttttgttttgtctctgccaggctttggtatcaggatgatgctggcctcataaaatgagttagggaggattccctctttttctattgattggaatagtttcagaaggaatggtaccaactcctccttgtacctctggtagaattcagctgtgaatccgtctggtcctggacttttttggtttggtaagctattaattattgccccaatttcagagcctgttattggtctattcagagattcagcttcttcctggtttagtcttgggagagtatatgtgtccaggaatttatccatatcttctagattttctagtttatttgcgtagaggtgtttatagtattctctgatggtagtttgtatttctctgggatcggtggtgataccccctttatcattttttattgcatctatttgattcttctctcttttcttctttattagtcttgctagtggtctatcaattttgttggtcttttcaaaaaaccagctcctggattcactgattttttgaagggttttttgtgtctctatttccttcagttctgctctgatcttagttatttcttgccttctgctagcttttgaatgtttgctcttgcttccctactgaaaaaagatgatcatattttgcaatgcaaggacatgagaattttgggctcgagagtgcaatgatatagtttagatgttttcccttccaaatgtcatggtgaaatgtgattctcaatgttggaggtgggaccgactgggaggttttgggtcatggggaaagatccttcaggaatggcttgggaaccaccccatggcacttagtgaattcttgctgtgttagctactatgagatctgattgttaaaaagagtctggcaacccttcttgccactcatgtcccagctctcaccatgtgacatagcctgttccccctttgccttccatcatgattgtaaagcagatcctggtgccatgcttctcacacagccttcagaactgtaagccaaatgtgcctcttttctttgtaaatcacttggcctcaggtattaatttataggaatgcaaaagagactaacacaccgtccaaagcattacacagattcaactctatttttatcaaatgaccaatataattgattacatatttagaaaaaaatactaaaattcctacagaatcaaaaaagagtctgaatagcaaaagcaatcctaagcaaaaagaccgaagctggaagcaccacattctctgacctcaaattatactacatgaatataataagaaagacagcatgctactagtagaaaaaaatagcccagaaagaaagccaaatatctaaaaccaactgttgtttgacaaaactgacaaaaatatacactggagaaacaaccctctattcaataagtggtgccgggaaaattaggtggcttatgtggaagaatagaacgagacttccatatcaccgtagacacaaattaactgaatatggattcagtgtttaaatttataaactaaaactataaaaatacttgaataaaatctaaaaagagtcctctggacattggtctaagcaaacaatatacgactaagacttcaaaagcaaatgcaataaaaacagaagtagacaaacaggatttagttgaactaaaggtcttctgcacagcaaaagaaataaccaacatggtgaccagacaatctgcaaatggaaaaaatatctggaatctattcatcttgcaaagggctaatatatagaatctacaagtaactcaaataagtcaactaaaaattacaaataacttcattaaagaatagacataaacagacatttatcaaaagaatacacagaagtggccaacacaaataagaaaatatactcagcatcaccaatcatctgataaatgtaaattagaaacaacatgatacggcatcttccaccagtcagaatggctgttattacaaataaaaacagcaggttttgcagacaaacataggaaaaataatgatttatatatgcttggtgagaatgtaaattagtacaacctccatgaaaaacaacatagaaatttctcaaagaactaaaattagaattaccatttcttccagtaagctgtcccagtaggcatgttcctcccaaacttttatatcagagaatgttgcctgcactcatatgtttatttcaacaccattttcaatagaaaagtcaaataatctaagtgtcaatcagtggatgattagataaaatatgatatatgtaaatcatggaatactatgcagccagtatggtatgaattcagtgtgaccagcccctggacaagggcttgagtggatgggatggatcatcacctacactgggaacccaacatataccaacggcttcacaggacggtttctattctccatggacacctctgtcagcatggcgtatctgcagatcagcagcctaaaggctgaggacacggccgtgtatgactgtatgagagacacagtgtggaaacccacatcccgagggagtcagaaaccccgagggaggaggcagctgtgctgagctgaggcagtggtgcagcagtttctttaacttccatatgatctcattttgcatcatcttctacttttatattagctaagaacttggggtagacaggtgctcctaagagatccttaacttgcccattttgatgggttttccagaagacgtgagaagccactttgttagcaaagcatcccaaatccatgccctgttctagatacatgtgagcccatttcctggtctttgcttaactgacaagctctcatcagtgcacctgggctaatttcacatcaggtagaggaacgcgttataaaggaaagctaatgttgtaatagcaattcctgcttaaaaaccttcagcttcattgtttttgtgtaatccatcagcaaattatgttagttcaaggttctcaatgggagtttctaataaatagaaaggatgtatagagcttcccctaattaaaatgaaacaattgtgaacacaacctcggtattcagccatgtctccacccttcacacccttcgccacaaaggaattttcacctctcctggaagctgggttcattttcaaattagttatttttttcaatgtaatatctcaagattatcgtatatgactattttagcagaaagtgaattatgggaacttgaactaaacaactgaaaacaaattcacaactaattaaacaagatgccagaatgtgattggctccaggctttgtaattcagcagttcatgtacccagactggaaatttacatgtcttcttgttaccttcacagcacagtcaactcccattatgtaagaaatggtgactgcattcccaagggttatgcatagatatgaaaatagactgggtaaggtgaggagttgattgtttaaattcccctctgaagaagcagcatcaactcaacaaaccacctctcttcactctgtgactagagctatgtcacaggccacatggacctaaatccttgatggatataacatgactacataaattgggctgatcatttttatgctataaaattaatagatgacactgcactccagcctgcacaaccaagcaagtcttcatctgtaaaatctaaaaaagaaaaattagtaggtactgacttcgaaatttttgataataatattttcaccacccaaatttaatcacacccacatgttacctgcatcttcactgaaaagttcccagtcacgatgagttccttcaatgctccatgtgttcaaatctggacatcaagagagtccagagaataaaacacaatgacggcagtgaaactgatatatattcagcacctcttaactcaggaggactccatacaccctggcacacagctgcttttctaaatggctcacaatgactccagctcactcacagagctcagacagaaacctcccttcagggtgggagctgggtggcagggggcactcagtacccgcagaggtgaaaatgagctttcagatggaacttccctgtcacctcaacatggaatttattgtttcatttcattacctctctttccataatggttcatttcttttggcctgttcattactgatatttttcagagcaatctcacttgaatctttactcttttgcattttgtctccttgacaatgttgggaagttttacctccagcatcataacatgatctagtgatctgacacattgtgcaaacaatacctacaaattcagaacctctttgtttttctttccacaaaatataattctttctgttctgtgtatgagcatgtcttagcaaccctgtacacacccacatagatgtctacaagcctatgaattgttctctgtaaataaaaatttatctcaaattccttcaatgttcataattctgagagtgaggaaggtccttctcaatctgttcaaacaaaatgcccagagaccatccagtaggtaaggagttcacctggctctggtgtggggtctgtctctttccctctgttgtcccacaggtcagcccagttgttcacgtcctaacaagaaagcccaggtttgtcctgattttaaaacacatcaaacttctgatgactctcctgttacccacatccatggagatagattatttattatataattcagcaaactaatgtcaaatgcccaagttgcaataccgcacatcctagggtatgttcatgcaattcaatggaggagaaaatctttcagagacagatggatctgaaatgataaatatgtgggtaaggactctgggcttgagtatcattgtccagccatgtttcacaagtgtgtcctgtcagggaaggatcagagttccttgtgctgtcagagggaaggggtcacagagttcctctctggttcccaggaaaggtaatcgcactaatcttcatgatcttcatgagactatcctccagtgctgacctgttacggagtttttgtctgaagttctcactgcaatccccaatctacatattttcaatcagaagtgtttagaggccaggacacatcttcaaggtcacacattgagaaggatggagatatgtcccactaccttctcctacgatctcagacagaatcccaaatttcaaaaggacacagaaggacagctctcaggtgcttttaaaaaatgacccacttccagggacagtgagcttccctgtaaccatggtggatgttctgaactacaataaacattggatggatccagtattgtttgaagtcactgtcattattacattcagctgttgtttcaatgtgtctgaaagggtaaatgactatttagatggcctgggtgtgtggttggttttatatgaatctttaagggttgaacagtactgaccctattccaaaatctgtccttgatccaggatcacactcatctctcagaccagctccttcagcacatctctttacctggaagaagaggactctgggcttggagaggggaggccccaagaagagaactgagttctcaaagggcacagccagcattctcctcccagggtgagctcaaaagactggcgcctctctcatcccttttcactgctccgtacaaacgcaccacccccatgcaaatcctcacttaggcgcccacaggaagccaccacacatttccttaaattcaggtccaactcataagggaaatgctttctgagagtcatggatctcatgtgcaagaaaatgaagcacctgtggttcttcctcctgctggtggcggctcccagatgtgagtgtttctaggatgcagacatggagatatgggaggctgcctctgatcccagggctcactgtgggtttttctgttcacaggggtcctgtcccagctgcagctgcaggagtcgggcccaggactggtgaagccttcggagaccctgtccctcacctgcactgtctctggtggctccatcagcagtagtagttactactggggctggatccgccagcccccagggaaggggctggagtggattgggagtatctattatagtgggagcacctactacaacccgtccctcaagagtcgagtcaccatatccgtagacacgtccaagaaccagttctccctgaagctgagctctgtgaccgccgcagacacggctgtgtattactgtgcgagacacacagtgaggggaggtgagtgtgagcccagacaaaaacctccctgcagggaggctgagggggcgggcgcaggtgcagctcagggccagcagggggcgtgcggagctcacggaatacaaggccgggtcaggagcaggtgcagggtgagcggggcttgctcatcttctcagagatcatcatctccctcctcgccagcacctcagctttccgtagaggtcctctttctttattgtgtgtggttctacttcctcacatccttgtgccaggaaagaaaggagtaaggcaaattttcctgttacaattgaagtttcaccaattactaagaactttcctgcaagtacctgcacagcccattataccttatttatatatgtatatattctaatgcttctcaccatctcttgatttgtgtcatcaatttaattgtgccctttttgaaattcatatgctgaaactttaaatccaatggatctatatcggaattttaatggtataattaatgttaaatgtggtcataaatgagaccctaatgcaatagagctgttgtctttataagaagaggaagagacaccagatacctctcacttctcacatgcactcagagaagaggccacgtggagacatagtgcactagaaggtgggcctctgcaagccaggaagaagccgcaccaagaaccaaccctgccagcaccttgatcttctacattcagactgcagaattgtaagaaaatcaatatttgttgtttaagccacccactccttttgtcttcttacgaagacccagacaggctaataccacacaactctgttagctccatctcctggagggagaagcagccccctgaagctgggcacatcgctcagattttcacatgaattaggcaaaaacagtagctctcatataaaaactgtcacgtccctgttgggacaaggtcttttaaacaagccctggggctttgtcacaaatgttgcattttatcctttattaggacttaattaattgacaatgagtaccagctggatggaaactgaccactgaccatcttctgctgtctccttattatatcacagaaaaccacagcaacattactctatgtcttcaactttctaaatttgtactgaatctattgctaaatgaggagctacatggggtctgagttttgttaccttcttcccagtcttccccaattaccaagcatagaagatactttcagtgaaatttagctgtcaatgcccccaacaccacatcatgttttaaggtccaaggactttctttggggggctattgaaaaacacttttgaatggaaaatcctaaagcatacaacagctgaaagaatggcccctgtgcacatgaaggctgaaggggtggatgatagggtacgttcctccaaggtgttcctgggcatgtgatggttggatacctcatgcatacgaaaacaaggactgaactgagatagaaacaagggccatatcctataggaaaacaagaaaaaaaggggcatccctgaagagagttaattagacttggtgggtttaagatgaaattttttccaaagttttttaatgttctaagctaaatatgaatattttcaataaactgcaaattaaaaggagaatgaatttagaagtttagacagaaaaaagccatgagggtgtagaaagcaaatccacaaaaaactgtcacatggcagaggccagaatggagctgatgcagctacatcattattctgcagacctagttgagaccctttggtgtttaaggcaggtccagcagtgaagaactcctttagtttttgtctgggaaagttctaatctaatcttcatttctgaaaaggatttacatggtaaagattcgtcttggcagggttttatttatttttagtcccccccaacccacgtcaatttgagtaaagtcatgtgttacgtaacaatgctgcagtcaacagtagaccacatatatgtttgtggccacataatgttgtaataccatattttcactaaactttttccatgttttgatgtgtttagatagagagatacttaccatggtgtttccatttcctgcagtgttcagtgcagtaacacgctgtacaggttagttgtctgggaaccctgcgctaatccacataccctgtgtgtagtagggtattccttgtaggtttgtgaaaattcacccttgatgcttgcacaatgatgaaattgcccagggacacatttctcaaaaagaacctctgtcaataaaccacacaccattgaatacaatccctgtgccttctgaactgaaaaccttctgctgagaaatctgttccttttctttctgttttctaaagcctcttttatttccagcaatgtggttttaaactgtgtcacattttttgtcattgggtttatcttacgtaaaatttatagagcttcttcattgtggatgaatatttgcttcccttctccaaatttggaaatattttttgctattattttgaataatttatctcttctctctctctctctctctctctctctctctctctctctctctccctctctctctctctctctctctctctctctctctctctctctccccctctctcccttcactaccccttttgtcttgtctttgtataactcctcaaatgcgtagttgagtgtttagtgtctttcctggcccataagtcttgaactcttttttatttctttcacttaaatttttcttctctgtctctactatttcaaatgatctttctttgagtttactgtttcttctattacttgatctagtttggtctaaaatcttgttaaaatttttggctgtattcttcaggatcaatatttttgtttagtcatcttttaaatgttttatctttattaaaattctcacattgttcttgcatgctgccactagctcattgaacatgtttctaacatttactttaaagtttctgtcaggtaatccatgttcttccttttcattgatgtcagtttatggaccttttggttgttcttctgtttggaccatgttcccctgcttcttcattttccttgactgtctttgttgttatctgttctttataacaaaagccatcatatacttcttcaaagactaggctcatagagatcaccctcaccaatcagcccagacagtaattgtgggtctctcaaaacttgataggattcaaacttctgtctgttcttagtggcccctaggttttagaggatgatagattgtgccaggactcacaggtaagggaggtagaaactatgtactcatgaccatggggtctgtgctgatctgagcttctcttgtcatcactctcaatattcaacttccccgtggatcaggctcagctgtggctgctccacgtggggctgttctcagtctgttgcctctgtgtgtgcagaagtcctctgtgaagttaactagtggagtcagacaggaaaatactacagaccaagaattctcagactgttctgcaaagcccctggattcactgaaaaaagaacaagtttggtccagcaggattcatggcaagtgttggtgagggagataacagtaattcaagtggaagttctcaatgggactcgccttcagtacaaagaagattaacagtcctcagagacactgttcagaagattctcttttaagataataaaactgagagcccaagacaagtctgtgtattactgtgagggacacagtgtggggacatctatgtgagcacagacacaaaagtccctgcagggagacaggaggggactgcatgttagttgctgctcagaaccaccagggggcattcaggacaccagtaggcactcagaaccaccaaggagagctcagaatcaccagggggcactcaggaaactggcaggtgctcagaaccaccaaggggcgctcaagatcccagcgggagctcataaccaccagggggcgctcaggacactagggggctcagaaccactagggggcgcccaggaccaccaggtctctcaagacaggagggcgcactcaggacactagggggcgctcagaaccatcagggggcaatcaggacaccagagggacttcagaaccaccagggggcgctgagaaccaccagggggtgctcaggacatgaccggccctcaggaccaccaggggatgttcagaacaccaggaagcactcaggacaccagagagcgatcagaacaccagggggcactcagatcctccagggggcactcaggacaacagggagctctcaggacaccagggtgagctcagtaaaccagtgttcgctcagaaccaccagggagcactgaggacaccaccgctcccttaggaggcagctccacatcaggtccctggatccgggcagggagggcggttccttttggatcttgccactaaccttttgggagttttcctgcttcctttgtggtttcaagaatcatttgcagattcttctcatgtacaaagctctgctttcttggattatgtaatgtttttggctttggatgctaccagaattacgttgtactgtgagaggattcattcgtggtgtgtgcaatagtgaatgaaagctccaatgttaggggtggctttgaaagctacgttaggggtggctgagggcagttagcagaaaatgatcatcactatagaaggctactcatttctttgcacatttgcataaacaattgtagtttatgccctaaaaactgcatgttttcttggccctttttcttaaatggctccactctaagtccagtaatctaattaagctgtgtttcaaagaccaccaatcaagttaattctgtttaatgcaacactttgtaaagaaaatgtacatctgttttttagagtcagctttaaattttacattactttacaaatattgatttgtcaaatttagtctcataactatcttcagtaatttaaaatcttagtcatgtcatgttaaattaagtaatcctaggtttctcacttgaattagggttactaagaattagaatagtaaaagagtataattagcttttggtgaggtttataaagaaagatgaggatttttttttttttttgcttaaaaatattctgttttccagtttacagggcttttcaactggttttaagataaccactgtttacatctaaacttttttttgtaaatgactgctgagtttctatacatattccatagctagagtttcaaagtaaaagctctagtatctttgtattagtgtgtgtatgcgtagatgtgttaatatgtgcatgtatatatatgtgtgtgtgtgtgtgtgtgtgtgtgtgtgtgtgttgtggctactaggtacaaaattggctttgaaataaatattttcaaattaagtaaatgagcccaatgcatttgaagtacatgtgacttaaataaatatttaataaataagttggctttaaaattattggtaaaaacaaattagagatattttaacaattatcagcataccttatagtttatattaattcatcaagtgattttatatttaaaatcacagctagatattatatggtgtcaaaattttttatgatgattataaaattattaacctcgttggccatatgcggtggctcacacctgtaatcccagctctttggaaggctgaggtgggtggatcacgaggtgaggagattgagaccatcctggctaacatggtgaaaccccatctctactaaaaatacaaaaagaaaaaaaaaattagctgggcatgctggcaggcgcctgtaatcccagctactctggaggctgaggcaggagaatgcttgaaccccagaggtggagcttgcagtgagctgagatcgcaccactgtactgcagcctggatgacagagcgagactccgtctcaaaaaaaaaaattataaacctcattaaaaccagaatgatctttgtaattttttgacaaatatgatgtttaatattgttgttttaataaaaaacaggtaaatagttattagaaaaacaattatttgcttaattataaggtttttactcaggcaagcacctgaaattcatgggttataacatggttaacagagaaaaaactttaaaggatgaattacaattttcataagtaatctagataagctacttaaataaaatagggaaatgtaatcaaataaaccttttaaataaacttgttctacaatttaaaaatctaaagtttaattaaataatagatattgactaaatgtttaggtcattactaattgttttaaaaaatatataagaaaatatttttcttaaaaaattattcttagaaaaataatgtaattcaaagttatttatataacatcataaaaagtaagagagttttaaagaaatttattgacatagagaagtacttttggtaagaaaggttaaaataaaaaaattttatatgagaaataatcttgcatggtaattttttatcctaaaataaaatgactaagaaagaatgacgtttagaataaaacaagatgttcaactatgccataaatggtttgtgtaagtgaaaataagatttataaaaagttaatttattaaaaaaccttcatattatcaagttgactataattgaaagggaagtatttataatagtctttatagagatctggcttttatataaaatatagtaatacactgaagactggttagaatgacaaaattgtcttaaagtgttgatttactaaataaaattataagatattttaattttttaacccccaaatttaacttttattgcatcttgccattttgattttttccctttgagaagacttgagaggctctccattttttcatcacgtcctttaacattttttttcttacagcgattagcttcttactgacttaacttctaactgttgttagcttttaactgctattattgtctgatgctaaaaacattttatctttaagttctaaataaaatgttttctttcaatataacattctacactcttggcttatctttaaatgtctacatttttctatgaaaccaaagtcttcacgtgtaatctgagtcacattcttggtatgtctaattaattcaaatgcttttttcattagagttgacctgcaggttatctacatgcattttccaatagggaaaagcaatcacactgtaaaaggttttgctttgctatttggtaactggcataaaacaaattttatattttattgaaataattcctatgttactgttattaaggtttccaacttactgagattttaagaaaatataaattaatgttattacattcatgtagctatctacattacttttaaaggccttgtgctgccacattactgacctttgactcctaggtctaaaaaggacacacagcattttgggagactaaggcaggcagatcacctgaggtcaggagtttgagaccagcctggccaacatggcgaaaccctgtctttataagaaatacaaaaattacccaggcatggtggtggatgcctgtaatcccagctacttggaagcctgaggcagggagaattgcttgaacctgggagacagagattgcagtgagccaagattgtgccactgaactccagcctgggtgatagagcaatattccatctcagaaaaaatatataaataagagaaaaaggacactaagtcctgctaaatcttaaacactgacagtaattaaagccccatctacagacctggaagaaaatgacaataaaaattcatcatactcttaagacataaggccagaaattgaaactactcaacaactccaggcccagggactattacagaagtggatttgtaagattgtaaaagctaattttgagatataatattacttgagagtttctttataagttaagcattaatattaaatgcacactaatggaagtctagcatctgggcccctgtgacagattgacaagggtttcttgaagaagtaatccactctttagcttaaaaaattattaaaatttataaaagacctatgaaaattatattttatggtaaaagtagttataatttaatagacttatttctcagaattgagagatagttttaatttttctcatgatgttcttataaggggttattgtttagaaaattaattctttcaaaaataaaagtttttgcttttttaagaaatcactgagttttcacttggctaaataaataacttactttacaataatctgtaattccattttgtaatatcaagtgttctaaataaacctttgatatttgacctccttcacaaaataaaagtctaaattcagtcatttgacctcattattcttttttgatatttgatctcctgaagccaaaaagaaacatatttagcttctttggtacaattaaattatactggaagcaatgtcaaatttgaaatggtgtttaactttggactatatttatataaatgtggactatataattggagtatattcatataaattaaagagtacatgttctaaaatggtatgaggttcaattgactttgatatgtcagtatattttgtcagtagtacttatgattattatataaaatttttgttcatcacagaaataaccaaactttctcctcaattctgtctttaaccgtggctattctaaaacttcagccatccacaattgttttcctttgattctttatcaggtggcttataataatctatagaattttgaggggtactcttaaatacacaattgtgacaattttataaattgtgccatttatatacagagaaaaacttccaagactctcatggagacctgatgcatttatgatggttgttaatataatgtcaaacaggacaggacttaattgcatgaactgaactaacaggagcctgaaataaattttatggcttattctttaaagcatttgctaattacttacattttgtttttcagaatcaaaaaaaaaattctcttaagctattcattgtttttaacaattgagtatagtatattctagtgagaaaattcaaaaacacaatttcttcttctctacataatttctccaaaatttggaaactgtgagtattgttatatcaaaatattaattcacataggttcaatataaatctgctttcttccgtaacagggcacaattggagacaatgatcattttaccaagactttaacttgaatgacatattttcatatttactttataaaatgaatttaagctggatagctgataaaagccccttgggaaaactggcatgtaacctgttttgttcagggccctgagctgtagtaagtcaataattttactttctgacagacccaggaatcccaagttgtcttggaaaattgaaaaaagaagaagtaacccaattcatatagctgtctgaaggcacagatgaaacaatgtctgggcttgatgcttttaaagattctacccttagatttcttataaaaaatttccagcaaggtcaatttatgaattaaatagcctatgtacaaaaaatagaaaaaaagagagctaatatgttaaattactatttttgcctcatcttatacaaaaaaattaagcctaaaacttatattacaaataaatttgccctactatgattgtgtctctaataactttggggaattatagagagaaatactgtttcaaaataaacaacagtgcatctgttattagattctaaccttgtccacttgtttttcaatttatattattttctacaatttatattagtttctacaatttatattagtttctataaaaatttatatttgcagaagcctccaaaatatttttcctgatttaaaattaccagaagttaaactgtgctttcttatagctagacatcttatactctaaagaaaataaaatcaatgacatgatttggctctgtgtccccaccccaatctcatcttggattgtaataattcccacatgtcaagtggaaaaaggtgggaataattgaatcatggaggctgttttctccatgctgttctcctgttattctcacaagatctgatggttgtataaggggcctccctcttcccttggcacttctctcttgcagccatgtgaagaagcacgtgtttgctaccccttccatcatgattgtaaatttcttgtggctttctcagccacgcagaactgtaagacaattaaaccttttttctttataatttacccagcctcaggtatgtccttatagcagcatgaaaacggacaaatgtaagcaacttaattatatacaaaaactcttttatacctgcctactgtgaaaggaaaataagtcttgagaccgcaaaatcaccaagctaaatggaagagtcaaactggtgttacaggagatagaaagaaattattttggtagatagttaggatgacagaatttctggcaaaaacatttcttctaacaaaaatcagcttggcaattacttattttctattcacacagagttcaaagaaatcacttctaacaaaaagcagcctgaaagatcaggctgtaaaacatataagcaactctgccacagagagggtgtttctgggtgtaatcaccaaacttcacatacatacactgggccctagtaaaaacagtgggccttaatgagcacattcctttccttttctgggggcactataacatcagaaagctggaaacttgcacaagtttaggatgcctgcacttgcaaggaggtacctgggacctagcatggaaaatcctcttcccctttttagcactctgggagtggagccccagccttgggattcccaggtgtttcccttcagtgatcaggactgaacacacacaactcatcatgcagtttgtgctgagctgggttttccttgttggtattttaaaaggtgattcatggagaactacagatgttgagtgtgagtggacatgagtgagcaaaacagtgggtttgtgtggcagtttctgaccttggtgtctctgtgtttgcaggtgtccagtgtgaggtgcagctggtggagtctgggggaggcttggtacagcctagggggtccctgagactctcctgtgcagcctctggattcaccgtcagtagcaatgagatgagctggatccgccaggctccagggaaggggctggagtgggtctcatccattagtggtggtagcacatactacgcagactccaggaagggcagattcaccatctccagagacaattccaagaacacgctgtatcttcaaatgaacaacctgagagctgagggcacggccgtgtattactgtgccagatatacacagaggggaagtcattgtgcgcccagacacaaacctccctgcaggaacgctggggggaaatcagcggcagggggcgctcaggagccactgatcagagtcagtcccggaggcaggtgcagatggaggctgatttcctgtcaggatgtgggacttcatcttcttccaacagtttctctaatgaacctccctaattttagaattctgtggttcctaatgtcatctctacatattttcaaaagatcattttaatatgaggacataacctctcatgtaccaaatgcacattgatgcttacaaagatgaaaagttctcaaccattgtcaccaggatcgcagtcctgaggaagctcacgggtgtctgatgagtctcctccattcaggcccaggacagaaacctcagggagactcctggactagaacggcagggattctgatcacagccaatagagagcctgggccagggtcagtgtcctgtagaagctcacagggttcacatctgacccttctcctgaccctaaagccaatccgcatcagcactgatctggtgctccttttgctcccaatacatgttctttctttggagtgtttgttctcccttttttatttgcttttctttcttcctgaaaaagaaacacatggtctctatgctctacactccagggctcaaggcattttcttagaactcaggcaaggctcaggcttggctactccagcccacgtgggagaggctgatgggatttccttctctccccatattctcagggccctcctctgtgttgtgtgtagactcatctgggaatgcaattggccgttaatagtgaaggggataaactcatttgatcaaaatgggatgtggatgtggaattaaccctgttctatgcacactgtcagagtcatcttcttcagaagtagtgttagaaagagcttgtgaactttatcagaatcaaaatggatccacttgtgttaaaaccctaatgaatgaagctggggaaggccatgaaggagggttctaacacacatattcctgataagaagaactatcataaatagaccctgcacagccacaaccttttacacagaggccaccacagccttaaaagctttatttctccaagtaaatctgccccgcaactgcctattcaaccttacaccgctatctcaaaatagctgctgtcaccctcctcatttttccttaattctcttttttattattttttaaattatactttaagttctagggtacatgtgcacaaagtgcaggtttgttacatatgtatacatgtgccatgttggtttgctgcccccattaactcatcatttacattaggtatttctcctaatgctgtccatcccccttcccccaaccccactacaggccccggtgtgtgatgtttcccaccctgtgtccacatgttctccttaattctttatcttccttttcctacctgaatgtacccatacatattttaattgaaacgcacatcctagaaaaaatattattatactttagagtctctgtctgttattcaggttgacatgacaagctacagacggacatgccacttttctgtgagacatagaggatgacagtttttggagatgtctaggaatatccaatgtccataagatcagccatcaataagtgcagactggaggtcccagagagaggcgaagctgctgaatcatcgtggaatttcattttctccagttctgctctgatggaatcaggcccacccattttatcaatgacaatctacctaacctagagtcagctgatgacagtattaatatcatctattaagtaaagtcataactatatatatagtgagagagggagagagagagagacggagtctcgctctgtcacccagggtggagtgcaatgtcgtgatcttggctcactgcaacctctgtctccggagttcgagcagttctcctgtctcagcctcctcccagtatctgggaatacaggcacacaccaccatgtccggccaatttttgtatttttagtagagatggtgtttcaccacattggtcaggctggtctcaaactactgacctcaggtgacccacctgccttagcctcccaaagtgctgggattacaggggcaggccaccaagtccagctaatttttgtatttttagtagagaccaggtttcacgatattggtcaggctggtctcaaactcctgatctcagcctcccaaagtgctgggattaaagatgtgagctactgtgcccggccaacaccacctatattaatgttggattgaataactacaaagtctaccctaaccaagtgtaccatcaaacttaccattacccagaggaaagaatctttaacatgagatctatattcttaaatgttttaaggtgtaaaactgaccacagtacaatcacccaattatgattttgctaatgagttgtagaaactgcatgtatattttggatattaacactttttcagatgcacaccttataattatattctctcattctgtaggttgcaattttttccacactttgcggcatctttttgttgtgatgtagttctgcttgttcaattctgcttttattatctgtgactttaatttgaaatatagaaaatcatccttttttatatactttaaattttagagtacatgtgcacaacatgcaggtttgttacatatgtatacatgtgccatgttggtgtgctgcacccagtaacttgtcatttaacactaggtatatctcctaatgctatccctctcccctccccccaacccacaacaggccccggtgtgtgatgttccacttactgtgtccatgtgttctcattgttcaattcccacctatgagtgagaacatgcggtgtttggttttttgtccttgtgatagacttctgagaatgatgatttccagcttcatccatgtccctacaaagggcatgatctcatcattttttatggctgcatagtattccatggtgtatatgtgccacattttcctaatccagtctatcattgttggacatttgggttggttccaagtctttgctattgtgaatagtgccgcaataaacatacgtgtgcatgtgtctttacagcagcatgatttataatcctttgggtatatacccagtaatgggatggctgggtcaaatggtatttctagttctagatccctgaggaatcgccacactgccttccacaatagttgaactagtttacagtcccaccaacagtgtaaaactgttcctatttctccacatcctctccagcacctgttgtttcctgactttttaatgattgccattctaactggtgtgagatggtatctcattgttgttttgatttgcatttctctgatgaccagtgatgatgagcattttttcacgtgtcttttggctgcataaatgtcttcttttgagaagtgcctgttcatatccttcgcccactttttgatggggttgtttgcttttttcttgtaaatttgtttgagttcattgtagattctggacattagccctttgtcagatgagtagattgcaaaaattttgtcctattctgtaggttgcctgttcactctgatggtagtttcttttgctgtgcagaagctctttggttcaacatactcaaatcaataaacaaaatccagcatataaacagaaccaatgacaaaaatcatatgattatctcaatagatgcagaaaaggcctttgacaaaattcaacaaccttcatgctaaaaactctcaaaaaattaggtattgatgggacgtatcttaaaataataagagctatctatgacaaacccacagccaatatcatactgaatggacaaaaactggaagcattccctttgaaaactggcacaagaaagggttgccctctctcaccactcctattcaacatagtgttggaagttctggccagggcaatgagacagtagaaggaaataaagggtattcaattaggaaaagaagaagtcatattgtccctgtttgcagatgacatgattttatatctagaaaaccccattgtctcagcccaaaatctccttaagctgataggcaacttcagcatagtctcaggatacaaaatcaatgtgcaaaaatcacaagcattcttacacaccaatcacagacaaacagccaaatcatgagtgaactcccattcacaagtgcttcaaagagaataaaatacctaggaatccaacttacaagggatgtgaaggacctcttcaaggagaactacaaaccactgctcaatgaaataaaagaggataaaaacaaatggaagaatattccatgctcatgggtaggaagaatcaatatcgtgaaaatggccatactgcccaaggtaatttatagattcaatgccatccccatcaagctaccaatgactttcttcacagaattggaaaaacctactttaaagttcatatggaatcaaaaagagcccgtattgccaagtcaatcctaagccaaaagaacaaagctggaggcatcacgctacctgatttcaaactataccacaacgctacagtaaccaaaacagcatggtaccggtaccaaaacagagatatagaccaatgaaacagaacagagccctcagaaataatgccgcctatctacaaccatatgatctttgacaaacctgacaaaaacaataaatggggaaaggattccctatttaataaatggtgctgggaaaactggctagccatatgtagaaagctgaaactggatcccttccttacaccttatacaaaaattaattcaagatggattaaagacttacgtgttagacctaaaaccataaaaaccctagaagaaaacctaggcaataccattcaggacataggcatgggcaaggacttcatgtctaaaacacgaaaatcaagggcaacaaaagcccaaattgacaaatgcgatctaatatgaaattcttaatgagttctatagttataagtacattatttctccttattaaaactaatcttttttgctgaatgggtggaagatggtggcttccctccaaaagaaaacatagttggttctgtaaagagttcacccatttcttccactataggcctgccctggcataatacaagctcccaacttaagaacttatgattttccatccatgggagaagccatcttttccatctattataaaaacagaagacacttcattaatatcactcccaaaataggctatgtcatatccagtgaggtaggatggctgacagtggtgagaatccaagtaattggtcaagcactgctatgtgtgaagaaacaccacagcatactctacactgtcactcatgatatggaattgttgcctcctcagcaatgtaactgagcccttaatatgtggctgggatgacaaagcaatgccagcctgcagagtggaacctgttcttccttctgggattagccaaaggccggtggcactcatggctgaccctactttccttacaactggacgaagcgaagcaactggatatgaacttctatcccaggatgtaactgtccaaagtgccttctctttatgtcaactggaaaagtgtgaaagacagacactattctcataaacggatatcctagttattccacccactagccagctcttccccccaggtggcagtcatagatttagaattgcaagtagaggccctggctaagcataccaccagtccctttaacaacacctaccataccatcatcattcttactgaagaaacctcacagatttgacaagtgacactatgaagctatatgaccctaggtattgcaactacagccaaaggtaacacttgtgtattaatgaaccctgaatgttgcatatatatacaagattagtcccacaatataactcaagctatgcaagcattagatacccatatttctgctagagatggatgccctctctcaggaccctgcgacagcatggtttagttgacttcctaacacatggaagactttcatatatagtagagctggtatactcttcattgctatcttcagttgctgtggattttattggtaccttgcactttaagtgagaatgtaatactgaccttctcaaaaactcctaggtccttgcaccataatgctccaacaaacacctactgtaattccggagactccagaatatttccaactccagtttaatggattcccttccaatatatacaagctatgccctttctaagaagtagccagattgactatgacacacgttttccatagaaacaaaatggaatttgacagtggggaatgatatacaggcagcttaatttcaaaatgcattttaaacttattttttgaggttttaatattattttcatactccttgaaacctgaaatttcacacttacattctaattgagacttaataacaaataaccagaacacatgaattgcctgtaatctctataccttgtattgtaagccacatttcaagtgtaaccttacttgtcagcacagtatgtttaccataggcataattgcttgtcctgactgtccagaaggcagggtggtattaagtatgcggcctctggagctgggaagtctggctttgtatactgtctctgccactgctaactgaaggacaatgggccagttacttcctgtaccccagttttgtcatatgtaaagtagggttgttgtaagaatgaaattagttaatatttagtacctaacaactagtaggcattacgtggtagctattcgtattgctatcgtcagagaacacacaggagtccattgttatttttaccctccccctccaaacaaaatgtgtaagacactagacatggtagctctgtaacggggttcgtcatgtattaaactgtgtacccaaatgatatgtcaaagtcctgacaaccagcacttcagaacacgtccttatttggaaatatggtagctggagatgttattagtgaagatgaggtcttacttgagcagggcaggccctcaatgtgggaagatgggtgtctttctaagtacaaggaaatttggacacagagacagagacatacagtgtgccatatgacagcagaggcaaagatcagagtggtgcagcagtaaaccaatgcatgtccaggattaccagtcacctccacaagtgaggaaagggcaaggaagaagtctcctgagtctcagagggagtgcagcccagctcacacttgattttggacttctagtctctagaactgtgagacaatacagtcctgtcatttttaagccacccagtttgtagtatttcattttggcagccctacgatattcatacagagttcttcacccaaaaggaagcactctttctcacaaacagtcaaagtcctggatgacggacaacctggagattgcaaacctccaaggaatcaaaggaggttctataaagtctaggagccccatctttcaaaggctgctcctcaagtccacacacacactttggaaggagaatcctgctcttggacatgggatccttagtgagccaactgccaataatccaacatcatcatgaattaaagatctctgacatttcctcgtcaccaacgggaattctgtcaagtagtaagtaaaacccttcttcaggaatctccacaccaaacagttctgcatggcttgggacgcctcaggaaacttataatcatggcagaagaaaaaggggaagcaaggcagtcatacatggtggcagaagagagaggttaaacttttcagtctctcttgggtgtaaagatacaatcttgaggcaaacagcagaatcaattttcttatgccttgaaattctccctttcaccataaatattcccttcacattaatctaactttatgtttgcatcgaactatgtgcctttttggaagttccggaagctaatttgagacagatagacaaagtcgggagaccctgatgcagaattccagaggtgacttcaatgttgctagttaacaacccaggcattgcccagatgatgccagcccaagatccaggtggactgggatgccagagagctgccagaacaagacgcacagacctggttctcagcccaaatcttgcatgcctttcttaccaactttcccttttttaaacccctgcctttccttcaaaattgaagtggttgcttgggatgggaatgcgttcacttcccctttaccattatggttaatacaataatttttgtaccagatctctctcttgttaattggatcctgcaggtggcagattccggaccagagtgacgttagaaactgaatgcacatactgggtggttcacagacacagtgttctgtgaagtttatgggtggattcctggggaagcctgcaagcctgttagtgattagcagaaccgcatccagctactgggatctgcacgccaggtgccgtgagcccctcaccatgttccctggtcccagctgcccgcggatggttcagccttgacaacgggctcggtgttctgggtggtgggagagcaagggggccccttgggcagcgtgctacagggctgtgaatccaggggcccacccggtgttccctgtggagtcactgagggaatgaggggcttctcagggcacagagctgtaacgcctttgtgcagtggtggctgaatacagtgacactgggcgcgtggtgagaagcggggcaaggtcagttcactggaccctccgccctgagcctcagatgagtcgggggtccccagacaggcccggcctctgccctgcggcggacactggagcctttgctgtggccgccaccgaggagccttgacctcaaagcagcgggaacctctctacccacctcggaaacctgaaggcagcggcggcctctcccagccaggacctcgccggcctccgcgtctccaggcccaaccctgtaccacataaaggaagtccgcgctgagctaccgggacacagcgccgttgggtgggcgggcgcggcgcggcgggaagcaccggggcagctgccacagagatgcgcggggactgtcgggaagtgggcggtccgggaggcgcggggctgatgggacgtgggcggtccggggacgcgcgggggatggcgggacgtcggcgatccggagatgccagggggcagctgggacgtgggcggtctggagaggcgcgggggcagctgagatgcaggtggtccgggacgcgcgggggctggcgggttgtgggaggtccagggatgcgagggggcagctgggacgtgggagttccggggacgcgtggggtcgccaggaagcggggtctaggacttagatccgccttctcttcaggccatgcagccccgaagctccgaatcctgggatgactcctgtccatgttggaagggaccctgccagtcctggcaaggttcaacggccttagggcaagaaatgttagtagagtcctggaagacgatgtggggaacgggtagcggccaccggatggtgatcgttcttctacaagaccttgacatggatggggagaaacagagaagaaccttccaagtttgtcccactggacatgcccaccacactttaccagccctttctagaaggcctgtgcgtaacacatgaaaaagctgctctcgacctttccctgaccttttaaaagaaaacatttgctgcatctaatccgcctagatgtaaggaggttcccaaatgtatgacagagtcagacaattacatgtcttgtaagttaccatgtgcttgtcttttgttttccgttttttttcgtttttttgttttttgtttttgagacggagtctcactctgtcgcccaggctggagtgcagtggcaggatcttggctcactgcaacctctgcttcctgagtttcaacaattgtgctgcctcagcctcccgagtagcttggattacaagtgtgcaccaccacgcctggctaatttttgtagtttttagtagagatggggttttgccacgttggccaggctggtcttgaactcctgacctcaggtgagccacccaccttggcctctcaaagtgctgggattacaggtgtgagccaccgtgcctggccgtaagttaccgtgtgctttttaaacaaatcatagcaaaggggtgtcttctggaaatgacattttgaaatggagttactagaccacccctggaagggacacagtaaccacacgtccacgttcgttcagtgggtgagaggacatggaggggagacctgggcaggaagggaagagggttccatgccaggctgctcatatttaaaagacattttcattgtagggacatggatgaaattggaaaccatcattctcagtaaactatcgcaagaacaaaaaaccaaacaccgcatattctcactcataggtgggaattgaacaatgagatgacatggacacaggaaggggaatatcacactctggggactgtggtggggtggggggaggggggagggatagcattgggagatatacctaatgctagacgatgcgttagtgggtgcagcacaccagcatggcacatgtatacatatgtaactaacctgcacaatgtgcacatgtaccctaaaacttaaagtataattaaaaaaaaaaaagaaaaataaaagacattttcatatcgttgtcattgttttcttgtgtgcattttattcctcgctattgtatacatcattggaaattctaagtattcttttgaaatatctagtctttctagatgttctgaagtgcctgatgtatgttaaaattacaggtggtaaaataataaattttgtaaatgtctttttgttaaaattcatatgcagtgttttattttattttgatgttggtggggggtggggaggatggccaaatccctgcttgatcaacacacattgcgtttgtgctctggttcaggggaggagagaggaggagaaagtgcagacttccaggcctctgtgcgcaccgggaggagagattaatgatcatctcttctgtctgtgtgtttgttttatttatctatggatatcctgtgtataaaggatgaacaagtcctatttataacatctaatcttttcaggtgttaagttgccagcgtatgacggaagtagcattattaaacgaatgcagcttgtacatattgtgttaaaattcataaaaagccagtcttctgaaaagaacccttgggccctccctccgcagcctccggcgccagctgcaggaagacctggccaggggaaggcgggcggcagaagctgctgctggctgtggggaaggcggtggagcccaggcctccacaggctccccacaggctccccacaggctcgcgcggctctggttgctgggctccgcacgggccgcgtgggggcgcctgctgggagcgaggaggcgccatcctggctcgcctgctccaggaggacgctctgggcctgcgcagatgcagttctccaggatgggcgcgggcgctgggggcggcgctccttgggctgctgcgcctccactgagccgcctgggtgtgaggacctcgcgccggcgcctccgggaaggacgcggagccgccgcggccgatcccagggctgcagctgctgcccgacgcccgcgggaaggcccttccgccaccgcccgggggttcgaacttggagcagctgctgccagctgaggcgccagcggcgtcgggagctcctcagagtcagtgttttgtgctggattcggcatgtcctctgaaaactcgggaatttgtcactgaaatggtgacaggaggtgagaagtttttttagacgttgccttcgctggcctggcgcggggctcaggcctggaatcccagcactttgggaggctgaggcgggcggatcgcttgagctccggaggtggagaagctgccttcgtggtaactgtggtcttaagttcagctgagaacgataaatggcttttccttgaattggctgcttttgtgatttctctcaggctcatcttttgtcagttaaaaatccagtggtaggtgtagcttagagacgggaaatttttggttttgttttggctacacgtaagtgttggaaattattttcttttacgttccagtgtgagcaaatccagaaggatgtcagattaaacaccgaatttaacaaattcagccgggcacggtggctcacgcctgtaatcccagcactttgagaggccgaggcgggtggatgatgaggtcaggagtttgagaacagcctgaccaacatagtgaaactccgtctctactaaaaatacaaaaattagccgggcgtggttgtgcgcgcctgtaatcccagctactcaggaggctgaggcaggagaatcgccgagattgcgccactgcactcagcctgggcgacagagcgagacttcgtctcaaaaaaacaaaaaaaaatcaatcattggaatactgttgttcattacaattaatgaacgtttgatagacgcataaacgaactaaattcacaagtacatataagtaaaataagccaaaaaaaaaaaactacatcccgtatgatgacacttttatacattctacagaatagaaactaaagtgatatgaaggttgggagttgaatggagaaaaggtgagcgaaaagagggaggacggaggagttgcaagagaacaagagaaaatgttgagggtaattgatctgttttctatcttaataatggttatggttacatcaataatttctaaattgtacattttgtgtgttaattataattttatattattcaagctattacaaataaatacctgtataaatttcttagggacggtttaagggagatggataaatcacataaaaagtcagatatttctgaatgtacaatgaataacccttagctctatctttattttttggtaattctaaaatgcagcagatttttttaatgtttttattacaagaagggtttcttcaaaccacaccaggtgtgtgtaactctgggctaaagttggttaagggagcagtgggatccggtggagaggagcacaggcctcgatcctggagcccattcttgtcacatgtgagctcctggacacatctcatagctccctcatgcttctgcgtttacattctcatctgtaaatggaggaccaatgggcatctgcctctaacaatgtattttcatgtgttaagatgatgtatgttaagtgtttactatagcacaatcttttaataagaaattacatttttttccaaatactatcattgtcttcaagccccaccacccaccagaaaacttaatatgctctgtgccctgccctgtcctcagacatccagcccaagagacttttatatagtaggagatatgcaaatagttccctccctctgctgatgatgaaaaccagcccagccgtgaccgtgcagctctgggagacgagctcaagtgccaggattcccaagtgttttcacttggtgatcagaacttaacacagaggaatcaccatgttgtttgggctgagctgggctttcctttttactattttaagaggtgatacatgaagaactacagatattgttcgtgagtggatattagagaaacagtggatatgtgtggcagtttctgaccaggatgtctctgtgtttgcaggtgtgcagtatgaggtgcagctggtagagtctgggggagacttggtacagctgtggtggggttgggggtgtcctgagactctcatgtgcagcctgcggattcatcttgagaagcaatgacatgaactgggcccaccgggcttcaagaaaggggctggaatgggtctcatacattagtgctagtggtggtagcctatactatgcagacactgaagggtagattcaccatctctagagacaatggcaagaacatgctgtacttgcaaatgaacagtctgagagatgaggactcggctgtgtgagagacatggtgaggggaaatcagtatgagcccagccagaaacctccctgcaggaaccctggggtggggggaaatcagctgcagggggcactcaggacccactgatcagaatcaaccccagaaggaggtgcacatggagattaggggctggattccttccaggatgtgggacttcaacttcttctgacagtttccccagggaaccgctctaagtttagaattctgtgtcatctctatgtatttaaaaaagatcattttaatgtgaggaactaactattctcacatgcacaaaatgcagattcacactcacagagatgaaaagtcctcaactgtggtcactaggatcagagtcctgaggaatctcaggcgttcctggtgagtcttctccaatcagacccaggacagacacctcagtgagattccatgactagaacaggctttatggattttaaaaaaaatagactgagccagggtcagtgtcatgtagaacctcacaggtttcacatctgacccttctcctgacactaaagtgtgcaaatcagcatcaatactgatctggtgctgcttttgctcccaatctgtgttctttcttgagttgtccctttttcatttgcttttcctgctccctgaaaaaagaaagatgttgtctctgtggtctaaattccagggctcaagcccttttcttggagctcaggtgggtctcaggttgtggctcctgcagccacgctggggaggctgatgggactttcttctctcccattgctcagggccctccactatattgtgtggagactcatctcagaatagatgtggccagtgggagctgaaggggacaagcttgtttggtcaaaatgagatacaaatatggaattcaccctgtgctgtacaaactgtcacagagtcactttctgaaacaatagtgttagaaagaacttgagaaagttgtcagaatcaaaattgggtcacttgtgttaaaactctgctgaatgaagctgggaaaggccgtgacggaatgttctcatgctcatatccctgataccaagaactatcgtaaatagactcttaaaaccacaatcttgcacaaaggtgcccacaaccttaaaagaattacttctctgagtaatcttcccagcagctctctgtgtaagattggactgatgccacccttgttattgattcttctatcccggagaagttgtctcaaaacagcttatgtaaccctcctcatttttctttaaacctttatctttctttacctgcctgagtgaacccatgcatgttcccattgcaatgtccatcttcaaataattatcattttactttagagtctctttttgtctgttattcagatttgacaagctgcagatggacacatcacgtttctgtaagacttaggggatgacagttttgaggcatggctggggaagtacaatgtccataagattgaccctcaataagtgcaggctgtaagtctcagagctgaagctgctgaatcaccatagaatttcatctttagttctgctctgatggaatcaggcccacctgtgtaatgaatgacactctacctaacctagagtcaactgatgacaggttaaatatctagacagcaaatttgcaacaccacttagattagtgtttgaataactacaaagtatagccgagccaagtatatcgtaaagcagactattatacatggagaatctttaacatgacatctacaattcttaattttttttacgtataaaactgatggttttacaatcaggctgtcatgattttgctaatgagttgtagaagttacatgtatgttttaaatattaacagttttttcagatgcctggtttgcaactatattctcccattctgtagatttggaattttttccatgctttgcaaaatctttatattttgatgtagttccagtccttcaattctgcttttgttgtctgtgcttttaatcttaaatttaggaaatcattgctaaccttttggtgggagagaattttacaattgcaggctatacatttaactgtttaacccatctagagttgattttttgtgtttattctaacctaatattcttaactatttgcaagtgaaaacccagtttgtttaacaccctctttaggggagagtatgatttagccgttgtgtagaaaatgttataaatcactttgccttcatattggttctcaacttgaaaatgagtttgccatcaatacgtgggtttatttctgagctctctatatgtatttatgccagtaccatcctgttttgattatgtttgtaattaattttgaagtctgagagtaaaatgcctccaagtttattcttgcccttttgcagatattagacaaaatattttaacatttcaccatgaagtatgataacagctatggcttttcataatgaattttattgtgtttaggttattttcttgtatttctattttgggtagagtttttatggtgaaaccttgaatttttttaatgttattttctgtctgagaagttaatgggaccttcttcgtatttaatttggcataccaaatgtattgatttgaggattttgaatcatctgtgcatctcaaaaataaatttgagttggtcatggtgtatgatccttctaaagtcctgtggaacttagttgactattatttggtgtgtggagggggctcatttatgtctactaggaatattggtctgtagtttacttttttgtgaccttgtctattactgaaaatacggtaatttgggccttatagaaagactggaaggttggcatctcaccaatttttgaaaaagttagagaatggttggcattacttctttaaatgttgagagtcctttttttacttaacatgtgacctatcatggagaatatttagtctttgcttcggaagcatacatattacactgctcttggttggaaggttctgtagatgtctattaggtcaatttgttcaatagtgttgttcaagtccactgtcttcttaagaattctcttaatgatgttctatccatcattgaaagtgaggtgctaaagtcttctcctaatttttattattttctatttatctctccatatctcttaaggtttgcttaatgcagttatatttatttttgtacaaatatgtaaaaaataaatgaaataataattgctaagtaattttaatggcaaaatcacataataagaaattatattttcccaaatgctgtcattgacactaagctcctccaggaatctcacatctgctctggacacggctctcctggtgtcctaccccagagcttgctatagaggaggagacatgcaaatagggccctcactgtcctgatgaaaaccagccttgcctgcgtctacgggagaagagccccagtccagaagtaccaggggtttccatttggtggtcaggtctctgaacacagaggactcactatggagtttgggctgagctgggttttccttgttgctaatgtaaaaggtgactcatggagaactagagatattgagtgtgagtggacacaagtgagagaaacagtggatatgtgtggcaggttctgaccagggtgtctgtgtgtgtttgcaggtgtccagtgtgaggtgcagctggtggagtctttgggaggcttgttatagcctgggggtccctgagactttcttttgcagcctctggattcacctttagtacctttattaggtactggatgagctgggtccatcaggctcctgggaaagggctggagtaggtctcatttatgagttgttgtgtaggtagcacaagctatgcagactctgtgaagggtcgattcaccctctccagagatgatgccaagaaatcactgtatctgcaaatgaacagcgtcagagccgaggataggtctgtgtattactgtggtggcattgtgtgcatcccttgtttaggtacatgcagagatgctgctttggtgtgttcaggggctcctgttttggggacaccaattttggagtttgcagtatccttgagtccagtacgttcatggtggcattgggtctggggtgtgcagtggcaatgagtccaggatacatgcagctgatgccgtatcttgtgaggacaagaacaactacaaaacgatcctattaataaataggcaaatgacttgaatacacatttttcaaaaaatacatacaaatgacatatagatatataaaatgttaaatatgagtaataatttttaaaattcaaatgtaatctacaataaattatcaccccatacctgttagaatagctatttttaaagaagatgaaagataaccagtattggggcagaagtggagtaaagggagcctatatatattgttactgaaaatgtcaattagtacagacattatggagaatactatggaggttcctcaaaaaataaaaatagaactaccatagtttccaacaagcccactactggctatgtatccacaggaagtgcaatcagtatgtcaaagagacatctgtgcccccacgttcattgcaggaatatttatgatagtaatgatgtgggaacatcctaaattaccataaatggatgaattactaaagaaaatgtagtatgtacccaatggagtaatgttcatcctaaaataagaagggaatcctgcatttgcaacagcaggcatgactctagaggaccatatgtgaagttccacaggcaggcgcagaagacaagtaattcgcgatttcactgtagtttgtttaaatggtagactcacagaagtagagtggagtgttggttaccaggggctggaggggtggactggaaaaggcgagattttggtcaaagggtgaaatgttccagttagacagaaggagaaagttacagtgttctaatgcacaagatggaaaatatggctaataatgcattatatatttcaaaatggctaaaaatgcaaatgttaaaaattttctcactaagaaatgatacagcctgggcgcggtggctcacacctgtaatcccggcactttgggaggctgaggcgggcgaatcacaaggtttggagttcaagaccagcctggccagatggcaaaaccccgtctccactaaaaacacaaaaaatagccaggtgtggtggcacgcggttgtaatgccagctactcgggaggctgatgcaggagaattgcttgaacccgggagacagaggttgcagtgagctgagatcatgccactgcactccagcctgggtgacagtgagactccaactcaaaaaaaaaaaaaagaatgaaatgatagctgtgtgaggtgatggatatgtcaaatagcttgattaacaattccataatatatacatgtatcatagcatgtgtgaggtgacctgtatgaaggtgaagtgacctgggggctgtgtaagattacctgggggtatgtgtgaggtgaacacggcacatatgaggtgaccagagacacatgtgaggggacatgggagatatgtcgggtaagccagggggatttgtgaggtgacacagagcaagtgtgaggtgacgtggatgcatgtaaggtgatttggggcacatgtgaggtgacgtgggggatatgtgtgagctgacctcgggtgagtgtgaggtgatccaggatggatgtgaggtgacctgggggtgtgtgtgaggtgacttgggcacatgtcaggtgacatcggggattggtggtgatgtgggtgtgtgtgaggtgacctaaggaggtatgaggtcacctggggcatctgtggggacctggaaatgtgtgaggtgggtacaggtgaagtcacctagggcacatgtgaggtgacctgtggaatgtgtatggtgacctgggaccgtttgaggtgacatggggaatgcgtgaggtgacctggggcatgtgtgaggtgacaaagggcatgtgtgcagtgacctgggtgcatgtgaggtgacctggtgcatgtgttaggttacctgggggatgtgtgaggtgaacaggggcaggtgtgaagtgcctgaggaatgtgtgaggtgaactggtgcatgtatgtggtgacctgggggatttacgaggtgacctgcgggatgtgtgaggtgaccttgggtgagcgtgaggtgacctgacgtatgtatgaggtgaccagggtgtgtctgaggtgatgtggggtatatgtgcggtgacctgggaaatgtttgaggtgacctggtggatgtgtgaggtgacctgcaggatgtgtaaggtgacactggggatgtgtgaggtgactcagggcacatgtgaggtgaaattggggatgcgtgaggtgattcagggcatatgtgaggtgaccttggggatgtgtgaggtcaccttgggtgagtgtgtggtcatctgggatatttcccaacttcgtaaggaaagcctgcaacaacacatggcattagaagcttcacactctagcaccattaatgcgtacatcctcaaggaactctaaatgttttgaggttagcttaaatgccatggagcggcaccttccccaggcacactcatatatgcatcctgggtctccctgccaagctatatctcctcaaatttacagtttatgtttgctctgtgacatcaactctgatatgttcaagtgtgtttttttttctttatttgtagttgttcaggcttgttgtttcactctcattactctgggctcagtcctctcctcaggtgtcccacttcagagctcgctgtgaaataggagacatgcaaatagggccccccctttcctgataaaaagcagcccagtcctgaccctgcagccctgggagagaagcaccagccctgggattctcaggtgtttccactttgtcatcagcaacaaacaaattaccatggaatttgggctgagctgggtttttcttgctgctattttaaaaggtgattcatgaagaactaaggatattgagtgagtggacatgagtgagagaaacagtggatttgtgtggcagtttctgaccagggtgtctctgtgtttgcaggtgtccagtgtgaggtgcagctggtggagtctgggggaggcttggtacagcctgggggatccctgagactctcctgtgcagcctctggattcaccttcagtaacagtgacatgaactgggtccatcaggctccaggaaaggggctggagtgggtatcgggtgttagttggaatggcagtaggacgcactatgcagactctgtgaagggccgattcatcatctccagagacaattccaggaacaccctgtatctgcaaacgaatagcctgagggccgaggacacggctgtgtattactgtgtgagaaacactgtgagaggtcggaagtgtgagcccagacacaaacctcctgcaggaacgttgggggaaatcagctgcagggggcgctcaggacccactcatcagagtcaaccccagagcaggtgcacatggaggctggggtttgtttcctgtcaggatttgggacttcctctgcttctgacagtttctctagggaaactctttaattttagatttctgtgcccaccaatgtcatctctacatttttttaatcattgtatatgaggactcgttctcacatgcacaatatgtatattgccacctatgggaatgaaaggtcctcaaccatggtcaccagcatcagagtcgtgaggaagctcaggggtgcctggtgagtcttctccagtcagactcaggacagtaacctcaaggggattcccttgtgagaactcacacattttcatgagaacagcaccaggagtcagttctaaaccattcatgaaagacccactccatgacccagtcacctcccaccaggtcaccccttcacaactggggattataatacaacatgagatttggggcaggacacaaatccaaaccatatcagatacacattgtgaaatacgcatggtggtcaggtaatttgtatttctatcacctcacagcgctaccattttattattttttttaatttactgcatgagtgagtgtctgatgagaacacctaagatctaccctttcagcaacaatcatttttacaatacagtattaactataggaccattgctgtacgttagatctccagaactcatccaacctgcacaactgaaactctgtacaatttaacacacatcacccaatttccctcacctcccaggtcctgggacccactattctactctctgctttcaagagcttgaatattttagatcccacatgtaaatgagatcatgcagcatttgtctttctgcatctggcttattcaactcagcatcatgtcctccaggcccatccgtgttgttgcaaatgtcagaatttccctcttttcaaagccaaacaaaatacagatgtatgtatacacattttctttatacattcatccatttacagtcattaaattattttacaaatctacactattattaataatcttgcaatgaacatgtctttggcaaagtaattttatttcctttgcatatataacaagaagtgggatcaccagattatatgatagctttatttttaacttatcaagtaaccaatcctaccacaggatatttccctttcccccacattcttgccaacatttgtcatctgttacatttctgataatagccatattaactagtgtgagttgatattgcattgtgcttctcatttgaattcctctgataattaggaatgttgagaactttttcgttttctgtttgccatgcatgtatcttctgaaaaaaattatccaggtttttgcccttttttatcagttcatttgttatttgctgttgaggtgtatgggttatttatacatttggacagaacttcttgtcagatccataattgcacatagtttttcctgtgctttgttattaaattcaaagaaatcagttccgaattaatggcaggaattttttttgctccatgtcatttatgagtttatggcttcaggtattatgtccatttttagttgattttttttttttttgggagacggagtcttgctctgtagcccaggctggagtgcagtggcgcgatctcggctcactgcaagctccgcctcccgagttcacgccattctcctgcctcagcctccgagtagctgggactacaggcgctggccaccgcgcctagctaatttttttttgtatttttagtagagacggggtttcactgtggtctccatctcctgacctcgtgatccgcccgcctcggcctcccaaagtgctgggattacaggcgtgagccaccgcgcgcggcctattagttgatttttttatatggagttagagaaggcctaattttatttcttttgcatatgaatgccagttttacaccattattgaaaagactgtcctttctctactgtgtgctcttggcacacaaaatcaggagagacataatgacaaaaaaaatatgagatcaatagtcctgatgaacatagacctgaaagtcctcaacaaaataccatcaaattgaatccagaagcactttaaaatgtgatacatcatggtcaggtgggctttacccctgggatgcaaggctcgttcaatatccacagtaactctgattcacaatgtaaacagaataaaagcaaaaagcatatgattatgtcaatagatgctgagaaagcttccgataggatctaacatctactcatgataaaaaccctcaacagactagacatcaaagaaacatacttcagaataagagccatctacaacaaacccacagttaacatcatactaaatgagccaattaaaacacttatctttataaatgacccagtctcgggtgtttctttacagtgcgagaatggactaagacagcatccaaataggaaaggaagtcaatccgtccatcttcactgatgatataattctatatctagaaaatcctaaaaactctgccaaaataattctagaataaacaactttagtaaagtgtcaggatacaaaatcaatggacaaaaattaccagcatttctataagccaaccacatccgagctgagagtataatcaagaacacaatcctattcgacttacagtatccacaaagaaaatgaaatgcccgggaatacagataacaaagtgaaagatccctacaaggagaactatgaaacacagcatacataaatcataaatgatacaaataaatgggaaaacatttcatgctcatggattggaagaatcaatattgtaaacattgtcataatgcccaaaggaattcagattcaatgctatttacataaaactatcatcatcattcttcacagaatcagaaaaaaatctattctaaaatttatatggaaccaaaaaagaccctgaatatccaaagcaatcctaaggaaaaagaataatgccagaggcatcatgatactgaccttaaactacaccataacgtcttgctaacaaaaacagcctgtactggtacgaaagcagacctgcaggaaaaaaaatagatcaaaatagaagacagaaataaagttgcacacctgcaaccctttgatctttgacaaagctgacaaaaacaagcaatggaaaaaaaaaactctgtgttcagtaaatggttctgggataactggattctggcaggtatgcaaaatgcaagagtgaaggagcctgtgcagcttctacctagatttcagatgtgtagagagccctgcatgcccaggaagaagcctgctgcaggagtggatccaccacagaaagcctctactagagcagtgccaaagatggggaaagatggagttggagcccccattcagagtccccactagggcacttcatagtaaagttgtgggaatgtggccacaaccctcaagaccccagaatggtagagctacgggcagcttgcaccctcagcctagaaaagcttccagcacttgactctcacttgtgaaggcagccccgtggtctgtgcctagcaaacctatagggattggctgcctgaggttttggggacccaatccttgttccagtgtgccctggttgaagtacataaagtcaagagagattattttgtagcgttaggatttaatatctgcagtgctgggttttatatgtgtgtggggcctgttggttgttcctttggccaatttatccctttgggattggaattatttacccaatgcctgcatcatcattgcaccttggaagtaaacaacttttattttttaaatttgcaagctcacagctggagggacattgccttaagactcagatgagactttgaaaatttgagttggacgttgatgaagttaagattttgggcactattgaaaaaaggtgattatattttgcaatgtaagaagaatatgagaactttgggtccgagagtgcaatgatataatttaggggttttcccctccaaatatcatggtgaaatgtgacccacaatgttggaggtggggccaactgggtggtttgggtcatggggaaagatttttcaggactggcttggcatccaccccatggtaattagtgaattcttgctgtattagctactgtgagatctgattgttcaaaagagtcttgcaatcctgctaccctctcatgtaacccctcctcacaatatgacacagccttctccccctttgccttccaccatgactgtaagcttcctgaggccctcacaagaagcagatgctggtgccatgcttctcacacaacctgcagatctgtaagccaaataagcctcttgtctttgtaaatcacttggcctcaggtattaatttatagcagtgtaaaatagactaatacactgcccaaagcaatatacagagtccatgcaatttctatcaagtaactaattaattatgtatttttaaaaatcctaaaatttatatagaaccgaaaaacactctgaatagcaaaagcagtcctaaccaaaacgaacaaagctggaagtaccacattccctgacttcaaattacacagcacaaagataataagaaaggcagcatggtagtggtagaaaaaaaatcaagagcccagatatatagccaaatatctacaaccaacagttctttgacaaaactgacaaaaatatacactggagaaacaaccctctattcaataagtagtgctgggagaattagatagccttatgtagaagaataaaatgagacttctgtatcatcatagacacaaattaactgtgaatatggattcaatgtttataaactcataaaaatacttgaaaaaatctaaaaataatcctctggacattggcctaagcaaataaaatatgactaagacttcaaaagcaaatgcaatgaaaacaaaattagacaaacaggattaattgaaccaaagatcatctacacatcaaaagaaagaaccaatatggtgaacagacaacctgtgaatggtaaaaaaaaaaaaatgtgcagtctattcatcaaatatatagaatctacaagtaactcaaataagtcaactagaaataacaacttcataaaagagtgagcaaaaacgagatatttctcaaaagaagacatacaagtgttcaacagaaataaaacatgctcagcatcacaaatcatctgataaatgtaaattacagacaacatgatatagcatcttccaccagtcagaatggctattaaaaataaaacagatgtttgcagagaagcataggaaaaataatgctttttatatgcttgatgagaatacaaattggtacaacctctatgaaaaacaatacagaaatttctcaaagaactaaaattagaattaccatttgacccagtaacccctcctggtgggtatgtttctcccaaaaggaaacttctatataagaaaaagtcacctgcattcctatttttattgcaacactattttcaatagaaaagtcaagtaatctctctaagtgtcaatcagtggatgattaaataaaatatgatagatgtaaatcatggaatactatgcagccataaaaaatgaaattgtgtctttcacagcaacatgaatagagttgaaggacatttcctaaataaaataactcaaattctcttttataattggaaagcaaacaatgggtacacatgtacatagagaaaaacaatagacactgggtactgcaaaagaaggcaaggtgagaggaaagtgagggttaaaaaatcagctattggctccaatgttcactatggggtaacagttacatcagaagcacaaacctcacctttatgaaatatattcatgttacaactctgcacatgtgcaccctgattctatgaaaataaaaacagaaaacatgaacagaattgttagactgctagctagattgaccaacaaacaagaaaaatgcaaaagtagcaattctttgttttgtaaccctttctcattttctggtaccataagaaattgtagactatcgtcctatattcttttctgaagtgctaccattagccatttctcaaagaaattctggttccttttttcttttattttctttcattttttttagacagagtctgcaacgtccacctcccaagttcaagcgattctcctgtctcagcctcccaagtagctgggattacagacgtgcaacaccacacctggctaatttttgtatttttagtagagatgaggttttgctatattggccaggctggtcttgaactcctgacctcaaatgatctgcccacctcagtctcctaaagtgttggaattatgggtgtgagccactgcacccagccgctggttccttttacagaagaatagtattaaaaactcatatcttgattcttgatgtactttttgttaatttcttgtagaacatctcaagtaatcaatacaggaagtatttgttgtgtattaacccatatatatatatacccacatctaaacggtttttatttatgttcctatattatgctaaacttgcaaatccactgagataccctaagttaataccacatgaatgattttcaccttccttctatgcctttccctaacctagcactccaaccgtggggaaccccctcccaccacacaccatccattccctttgtagtccatttccaggattcctgtagagtggaacccgattgtgtaagttgtgctcttttgtggaacatcatcaagtggagtccagtgctgacgtgcagtttcttttttctttaatcttatggactacactatttctgaacctacttagtacctcttttgatttcatacattagtataatggcataagatattttctatatagtctgcattccatcctggaattcctaatcacctatttttttaaaatttcttgtggattaagattgtattagtcagtgtcccctagagggacagaacaagtaagatacacatacacacacacacacacacggagtttattaaggagtattaactcacactatcacaaggtccacaataagccatttgcaagctgaggagcaaacaagccagtccaagtcccaaagctgaagaacttggaatccgatgtttgagatgaggaagcatccagcaggggagaaagatgtaggctggaaggcgaagccagtctaatcttttcatgttcttctgtttactttttattctggccacacttgcagctgattagattgtgccacccagattaagggtgtatctgcctttttcagcccactggctcaaaggttaatctccttcggcgacaccgacacagacacacccgggatcaatactctgcatccttcagtgagatcaagttggcactcagtatttagcattacaagtccaccctttgtcaacttgaacccatacacatctcctgagattatacataatcttcaaataaagacaagaataaagtcataattatgcctaataatacaattattcttcttacaactggaaacacaccaatccccaatccaaatggtactacatatgctccactccctcaaggacacagccaggatcatctgatgacttggtgtctagatggcttcagcacttttaattttacctccaatgttagactccactttatcaatgcagatgtagcagaatattttaagacattgatatgctgaaaaattcaacagttcataaaagttgccttcccaccacagccagtggttactactgaataaggacctgccatcctctagggagaagctataatggatggggtgcactgttggtggttatggaaatcgatccatcgtggcaaatggcagcatctttctttgataacattatattctattgtgcatatataccacattgtctttattcatttgtctatctactgacagattttttccatatgtttgctgttattaatagtgtttcaataaacataggatgcagatatcttcacaaggtggtaatttcatctcctttggatatactcccagaaacaggattcctggtcatacaatatttctggctttaattcatttaggagcctttatactgctttccataattgtgaaaatgtagaatggtatagccattatgaaaaacagtttcagttttgaggtatgatctgtaaacaaataatgtttgttatggctctcaatgagagtttctactaaatatgatggaaggtcaggaaggtctctcaccttaaagcagggatggattatgcctcttatttcctaaaagcaaaagattggaagcatgcatgatggaggtggttggcaggtttcaggatgatctcataagaggagaatctgttggataaaactgttgggttttcagtcatagacacacctacactcaatatgaaatgatgaaatcaagtgaggatctagaatgtgttcgcttgaagcaacagcatattctcaaaggcacctattgctccatcacaagggtgatgaacttttgaaaccagtaaagtgtgagagcacagtaagtgataaagttatcacatttacatgaagtttgtttaatgtgccaagggctcgcacagattaatcataaataaacacaatgtattttagcatacatagatgtctagagaagaatcttcttagagaaacttcttcaggttacagaaatctgtgtaagttgtagatctaatggagaagtgtctatgaatactggtctgtttttgaagtatggaaagatgatctcttttggagtaggcttgcgattgtgttgatttcttaattgtttcttgagttgtaacaaaagaaccaaaaaaatgactaaccggagtttcatggctgtgttgataaaaatttttcataagctttctgtcaattatttgagaccagatttcctgatttttttctccaatagatacatgttcacaagatctcaggaaaccacctctcaggtgctttagtttaaaagactagcttcctagaaaaagaagattctgtctaaccatgacaagttggtttcatctgcaaaccatcaagtttgagacctcattgtcaagaatcataaaaattttaactccaatgtactgaaaatcataaatctcgaatttaatgttgataggcattgacaaaatggttcattcttggatgcgtcctatgttgctggctcaacatatcagttaattgagaatcctcacttagctccctctgtttgtagcactgagttgattgtcaatcttcagagtcatccgttgaaggagagtcctgaggttcatgggattcttgtagacactcaggggaacaaaagaaagaaacagaattgagggctgccagccatttccacatcactaggaataattaccatctaagtataaaggtctgcatcattcagaacaccctgcatgacaggctgatgcaaaaaatccaaccctacagaggctccacagcaacctttacagttctttccgggaagaaataatctccaagttaagtgagtcagtaaagctgctctgagctacagtaaaaattggattgggcccgatttgtctgagttcagtgtaattattatactcagctgctgccccaatatagactgaggatggataatttaaatgagcctggctatgtggtttgttatatatctgaactaaataaacataaagggcctgtctggactagcgtgagggtgagagatcctgggagccccagccccccatactcttatctcccttcctccaggaacctctaggttctcagggtgagaatccacaagatccattcatggctctattaccaggagaccaaaatctctgaccttgttcatacagacaaacaggcgaaggacatttttagatccttatctatgtggcgaaaggcaatctatccccattacaagccttaccagcaaccttcctttgtcatgaaaatgggtaaaattagccaataggattacatttaagaaaattttcctgtgatgttccagccagaaaacagcaaaaatcagcttcacacctggagacttcttgcatcggtcacagcccagagaaagaagatcaccatagcattaaaatgcaactgtaagaacatgtaatgcttccatgttccacgcattacgtctcaccagtttagtcaatatggattaaatatgagagtgtggcaattcgcaaactctatctgaggaggaaaatcggataaaaaatgttatgaaaaataaagcaatttgaagcctctgacttcagcaacttcaccactaatgaaatgatgtaaccctcattggcctcaaatttagttttcacggggcatctgcagggttccaaagtgagaccaggtgaattcaatgtgcatgcacttcccaagtgtccacttgtattctgtttctttacttctgtttacagaaagtagacacatattcagtcttagtaccagtgtagggagcgctttccatgagatggataccagaaaaaaatggcaaacatgggatccgttaatataaaaattagccacgatgtatatatatatatgtgtgtgtgtgtgtgtgtgtgtgtacacacgcgcgcgcatgtgtgagttgaatagcagagttggagtgggtttctatccacatgtacctgcacctgcaggtattctcaggtgccataatcaactgtaggaccctaaaggaaataagagtctcccctcaacccctgaagagtgtttgggttcaccgtgtgtccaatgattctgtgcctcttgagctccaggaaagggctccctggtgatgcatgagatcttttcttggagtctctctgcagagttcactgggtttcctaaaggcaattcactatttcaaaagatggtgtgaggagcatgtggtgtccctaaaggagaattctgagccagggcacaaccactttatactgagctggatacactggtaggaatatactctgtcagctcagatagaaacctccctgcatggttggggctgggctgcagggggcgctccggatacacccagcacaggctcccgccccagagcaggtgcacaggaggctggggagaggttcctcccagggcctgggacttcctttaaaaatatctaaaataagtatttcacaaagactgctgaagtttgtataaatatctattcaattgtgagcatttatcaaactggatgttgtaatgagaaccacttttacaatggggatttcaaactctgctggaggtcaggaagagatcctttcttataaataaatgcaatttttggataaacacagtcattccctaaataacgcattcacatattatggtctagaaatgatgcaagttgaccctgagacagtcaaatgtggtttcaaagtgaggtgctgtccttgaggagcttgttctccagtgggggaagctctgtcaacacagagttcagggatgtgtaggggacacatggcctctaacaggattacggcttgaaccctcagcttctacagttgtgtcacccatgtgtctgtttctcatactgggtcaggaattgggctattaaatagcatccttcatgaatatgcaattaactgaggtgactatagtatctccgttccctgagagcctcacccaacaaccacacccctcctctggagaagcccctagatcacagctcctcaccatggactggacctgaaggatcctcttcttgatggcagcagcaacaggtaaggggctccccagtctcagggctgaggaagaaaccaggccagtcatgtgagacttcacccactcttgtgtccactccacaggtgcccactccctgcagctggtgcagtctgggcctgaggtgaagaagcctggggcctcagtgaaggtctcctataagtcttctggttacaccttcaccatctatggtatgaattgggtatgatagacccctggacagggctttgagtggatgtgatggatcatcacctacactgggaacccaacgtatacccacggcttcacaggatggtttgtcttctccatggacacgtctgtcagcacggcgtgtcttcagatcagcagcctaaaggctgaggacacggccgagtattactgtgcgaagtacacagtgtggaaacccacatcccgagagtttcagaaagcctgaggaaggaggcagctgtgctgagctgaggcagtggtacagcagttttctgaacttccatagtatctcattttgcattgagttccgctttaatattagccaagaatatgggatagacgggtgctcctaagagatccttaacttgcccattttgatgggttttcccaaagacgtgagaagccacttttttcgcaaagcatcccaaagccatgccctgctccagaaacacgtgtatccatttcctggtctttgattaactgacaaactctcatcagcgcacctgggctaatttcacatcaggtagaaatatgtgctttaaagcaaggctaacgttgtaatagcaattcctgcttaataaccttcagcattgttgttgtgtgctccatcaactaattacgttagttcaaggttctcaatgggagtttctaataaatataagggatgtatagaagttcccctaattaaaacaattgtgaagacaacctcagtgttcaaccatatttcaacccttcaccacaaaggaactttcatctctcctggaagttgggttcattttcaaattagtttttttattttaatatctcaagattattgtatgtgactattttagcagaaagtgaattatgggaacttgaactaaccaactgaaaatacattcagaactaattaaacaagatgccagaatgtgattggctccaggcattttaaattcaacaggttatgtaaccaggctttaaatttgcacatcttcgtgttaccttcatgacacagtcaactcccattatgtaagaaatggtgagtgcattcccaagggtcttgcacagttataaaaatagacttgatgaggtgaggagttgtttaaattcccctctgaagaagcagcatcaacccaacaaaccactctcttccctctgtgactagagctctgtcacaggccacatggacctaaatccttgatggagattacaggactacgtaaattggactgatcgtttttatgctgttaaattaataggtgagtctgcactccagcctgggcaacagaataatcttgtctgtaaaatacaaaagaaagataaattaatagatactgactttgacatttcggataataatattttcataaaccgaatttaattatacccacattgttacctacaccttcactgaaaagttcctagttatgttgagttccatcaacactccacatgttcaaatctggacatccaagagagtctagagaataaaacgcaatgagggcagtgaaacttgcgtatattcagcacctcttaactcaggaggactcaatacaccctggaacactctgcttttctgaatggctcacaatgactccagctcactctccaacctcctcaaacatctggcctctgtttgccctaagttcacgctctgctcttagtctatgttctgaagtctttgtagaggtgaaaatgagctgtcagatggatcttccttctcactgcaacatggaatttgctatttcacttaatgaccactctttccacaatggttgatttcttttggcctgttcattactggtgattttcaagggaatctcagttgaatctttactgttttgcattttgtctccatgacaatgttgggaagtttttcttctagcagcataacatgatctagtgacctgacacatttgcagcaaacaatacctacaaattcagaagctctttggttttctttccacgaaatataattcttgctcttctgtgtatgagcacatcctagcatccctgtacacacccacgtagatgtctacacgccgatgaaatattccctgtaaataaaaaaagtatctcagtttctctcaatgttcataattctcctgagggtgaggaaggtacttctgggtctgctcaaacaaatggcccagagaccacctggtaggtaggtaaggagctcacctcgctctggatattgagtctgtctctttccctctgtcgtctcatagaaggccagcccacttgttcagctcctaagaagagagcccaggtttatccagattatacaacacaaccagcttctgatgactctcctgttacaacatccatggagatattttgtgtattatataattcaccaaactaatgtgaaatgcccaagttgcaatactgcacaccctagggtatgttcttgcaattcagcggaggagaaattctttcagagacagatggatctgaattggtaaatatgtgggtacgaattctgggcttgagtgtcattgtccagccatgtttcacaggtgtgacctgtcagggaagaaccagagttccttgttctctcagagggtagagctcacagaggtcctctctggttcccaggaaaggtaatttcactaatcttggtgatgagactatcctccagtgctgatgtactatagagttttcatctgaagctgtcactgctatccccaatgtacatcttttcacacagaaatgtttagaggtcaggccatattctcagggttacacattgagaaggatggagatatattctactaccttctcctgagatctcacacacaatctcaaatttcaaaaggtctcagaagggcagctctcaggtactatttaaaaataacccacttcctgggacaggtagcatccttctaaccatgatggatgttctgaactacagtacacattgcatggatccaggtttgtctcaattcactgtgattattacactcagcagctgtttcaatatgtctgaaggggtaaatgacaatttaggtgacctgggtgtatggttggtgttatatgaatctttaaatgtagaacagtattaactgtattccaaaatctgtctttgatccatgatcacacttgtctcccagaccagctccttcagcacatttcctacctggaagaagaggactctgggtttggtgaggggaggccacaggaagagaactgagttctcagagggcacagccagcatacacctcccagggtgagcccaaaagactggggcctccctcatccctttttacctatccatacaaaggcaccacccacatgcaaatcctcacttaggcacccacaggaaatgactacacatttccttaaattcagggtccagctcacatgggaagtgctttctgagagtcatggacctcctgcacaagaacatgaaacacctgtggttcttcctcctcctggtggcagctcccagatgtgagtgtctcaggaatgcggatatgaagatatgagatgctgcctctgatcccagggctcactgtgggtttctctgttcacaggggtcctgtcccaggtgcagctacagcagtggggcgcaggactgttgaagccttcggagaccctgtccctcacctgcgctgtctatggtgggtccttcagtggttactactggagctggatccgccagcccccagggaaggggctggagtggattggggaaatcaatcatagtggaagcaccaactacaacccgtccctcaagagtcgagtcaccatatcagtagacacgtccaagaaccagttctccctgaagctgagctctgtgaccgccgcggacacggctgtgtattactgtgcgagaggcacagtgaggggaggtgagtgtgagcccagacaaaaacctccctgcaggtaggcagagggggcgggcgcaggtactgctcaagaccagcaggtggcgcgcggcgcccacagatcccgaggccgggtccggagcaggtgcaaggagggcggggcttcctcaacagctcagtggtctgtctcctcgccagcacctcagatgtccccaggactctctttctttattatctgtggttctgcttcctcacatccttgtggcagggaagaaaggaggaagacaatttttctgtttactgttgaggtttcaccaattactagaaactttcctacaagttcctgcatgactcattttgccatatatggattctcaccatctcttgatttgtttcatcaatcgaattgtgccctatttgaaattaacttactgaaaccttaaatccaatggatctatactggaattttaatgatgtaattgaggttaaatgtggtcaaagtgtgagaccctaatgcaataaaccgttgtctttataagaagaggaagagacaccagagacctctcacttttcacgtgcacacagagaagaggccatgtggagacgtagtgcactagaaggtggccctgtgcaagccaggaagaagccatactaagaaccaattttgccagctccttgatcttcgacattcagactgtagaattgtaagaaaatcaatatttgttgtttaagccacccaatcctgttgtcttcttacgaagacccaaactgactaataccacctaactctgttagctctgtctcctggagggagaagcagccccctgaggctgggcactgcatctctcagatttccacgtgaagtaggcaaaaatagtagttctcatataaaaatgtgtcatggctctgttggccatttttgagcatggtctctgaaaccagccctggtgtgtgtgtgtaacaaatgtcccttatcttttatttggacataacaaatagacgataggtaccagctggatggagattggccactgatcatcttctgttctccttagtatgtcacagaaaaccacaccaacatcaccagcatcactgtttttcttctaccacctcaaacggactacagaaatgatccctgcagtatggtctatttcttcggctttcgaaatttgcactgaatctcttcctaaatggggagctacatggggtctgagttttgttcctttcttcccagtcttccccaagtaccaaggacagaatagacttaaaatttggccatcaatgcccccaaacaccacatcactttctaaaatccacatcctgcatccatccttctctggacacccctcatcaggctacccaggaatggccagaatctggtatcagcttatgggctgaggccacgagttatacacatgtgtgatttcagtcacacacactctacttcaggaccacacctgtgttctgaggagctcaggcacctgctgatctcagtaattctctaataaatcacacacctcttattaataaaggtccagatggccccatcagctgcagagcagtggagtaaagctcatgggtgggtccatcaggcagaagtcagacaatggaagggatggctggtcacttccattttcactgatgttcgcaatgaattttaatggaataaaacaatattaactacaaagagacagaaaagaagactggctcgtcaagatatttaaggacaaggaactttatttggggggaaagtgaaagacacttctaaatggaaatccctaaagcacatacagcagctgacagagtggccactgtgcacatgagggctgaggagatggatggtagagtccattcctgcaacatgtctctgggtgtgtgatggttagactcctcatgcatatgaatataagagctggactcatggagaaaaaaagggccatatcccataggaaaggaagaaaaaaaaacagatgggcacccctggagagagctcattagatttggtgtgtttaagatgaaaatttcttccaaaaattgtaatgttctaagctaaatatgaatctcttcaataaactgagaataggagaatggagctaggacttgagagaggaaacaaatcttgagagagcagaaagcaaatccacaaaaactgtcacatgacagaggtcagaatggagctgatgtagctacttcactattctgcagacttattgaccatgtggagaaggggcttgaacaaatggagacgttctccaaccttctgaatcagcctccttcttatgcatgagtagaaatcatagttctgggggtgaccttcccaattttcctgtccatacctcttcccccaggggtagagtgtcttcccaaccacaatggtttctcaccagtgttctcagcttctcctccattgtacttaccctgcagattaagaatttcttctagatggagttctttgggaattttctgttttctttagtttctgttgactccaccacacccccataggatacaggttttattggatttcccctggaaatagtgggggtggatccaggcgttcaacagtcctcgctgttcttcccttcctgtcagcaccacaggacagcagataagggagttgactgtggatttttcaaattcctgggaaaagcctgcaaggactagtagattcacactctaataccattagcacatgtatccaaaaagaaacctcactaaatatttccaggttagcctgttcctctctcagtgccatccagtggcacctgccctgggttcacgaacatgtgggccccagtcctctctgctggcatctctctcctcacatttcagtcttctcgttagctctgtgaaagcagctcagatatgttaaaaggttttcttcttcatttattcagtttttcaggtttactgttaaggaggtcagaataagatcatagtttcctcatttttcacatttgcacgctgagtagccactttctatataaaagccagaaactaagggaacaaatcaaatatccatatccactacaggtgaacgttaaaaaatttgacatatgattatggactaaagtacaatgcagaattagaatcaaggcatcctcattctcataaaagcatgtctacattctcaaataactctgctgagtgaaagtagctgaagaattaagagtgcacttcataaacttctaattgtataaactgcagaaggtacaactattctaaagtaacagagcagatttgaaatttgggagaaatgggtgttgaaagtaattgggtggtgagatgaaattacagagaagtgacagaaagatttaggggttaacttaattgtacacaacctgattaaagtttgcacacatacgttaccattttccaaatggtgcagtgtagatttgaattaattattaattgtacttaaagcagtaacaaagaaacaaatgaatatgttggttgaggaggagcaaaaaatagatgggtatgaacactcaaaacatctcagactcttgaaagtacacatgcttgaacactggttttctctgtatactttaggtaaagagcagaatacattaaaagaaaacagagatgtcctggcgggggtggaatcctgcaaacctcactaggcgtgtcccacactgccctggagttgtctcaggggagcagtctcctctagtggtcagagacacaggcatggataatggggctaatactgtccagctgtgtgaccttgaacacattgtataaacactgttccatatgtaatttatcttccttaaaatgtaacattgacacttgcattaaatgtattctacaaatatgtcaaaaagaagatgacgactgctaaatgattatcaaggcacaatcatataatataatgatattttcctgagtgataagatgactaccaatctcccccagggcactttgtctgctctgagccctgcgcctcctcaggattcccatcccagagcttgctatacagtaggagacatgcaaataggtttctccctctgctgatgaaaaccagcccagtcctgaccccacagctctgggagagaagcgccagccctgggattcccaggggtttctatttggtgatcaggactaaagacagaggacccaccatggagcttgggctgagctgggttttcactgttgctgttttaaaaggtgaactagagagattgagcgtgagtggatacccttgagagaaatggtggattatgtctgggagtttctgaccaggatgtctacgagtttgcaggtgtctagtgagaggtacagctcgtggagtccggagaggacccaagacaacctgggggatccttgagactctcctgtgcagactctggattaaccttcagtagctactgaatgagctcggtttcccaggctccagggaaggggctggagtgagtagtagatatacagtgtgatggaagtcagatatgttatgcccaatctgtgaagagcaaattcaccatctccaaagaaaatgccaagaactcactgtatttgcaaatgaacagtctgagagcagagggcacagctgtgtgttactgtatgtgaggcaccaggtaagaggacatcagtgtgaacacagacacagtttcctgcaatgacaagggaggaggctgggctaaaaggggcactcaggacccactgaaaacgggcagctctagggcaggtacagatggttatcatgggctgctttccttcagggtctgtggcctcctctgcatctaccagttcccctcggagcctctggacatttatgtttctgtggccacccctgacatctctggattagaaaagtttattataggaagaggaaacattctcatttgtcccaaagcagatgtaagtaatggaagcaaaaaatgcacaggaggccaggcggggctgtagatactgtcaccccagaatgtcaatctcaccactagtactggagagggaagggagtttgatggaccttccctaacaaccctgtggtccaagataagtccaggaagaccattggtgcctcccagagcacagttgtccatcagggatgtccaatgcgtcccagcagcagccatgcctcagtgtctccactgtgcacagccactgtctgggaggagctcccaggatgggtgtctttggcacacaccaggtggcgggtgttagagtgcagtgcagcagctggctgcctgttctattgggctccctgatgctggagagatgggaggtgcattcgcagggccagcaccctgtttgtgaatttttatataaaaaccctgattttacttcatttttgcagatgacatagataactaaaaacagaatctgcaaagaaattgtaattttcaactttaccccaaattcattgtttcttaattctgtgcaagatccagacatattattgccttcctcatgataatttattctatgtaaaaccgaaatcattttttctcctactctttgtttctgttcaagtacagagatcttgagcaaagtaagttgggttctttccacacactaaccctcaccttccccagagaatgagcagagattgtcctcagtctgagtctaagggaggagctgtttctgcacaactcagagcctgcagagacccccaggtgcagcttcagtgagtcagacatttctccatgtgggcgacctccagtgcctgtgactgctgctcaggcctaattgttggttaagtattacgacaccctttaggtgatcacatctcaagcctattctgaaaatcaccatgaacagagatagttcaatggccattctcctgacataagtttctctttattacttggttccaagtatggagaaaaatgtgaccctatatttgtctgaatccaacatcagcatccacggcattacgctaggagactcactaattgagcacaagtgagctcgttattctcatagaaatgtaagtatttggaaatttcagcgtgttctccagaacctgtggctgccaacaactgtatttctcggtgcactcttggcctggtgaagccttcacagaacctctccctcacctgtgccatctctgcattctccatcacaaccagtgtttccttctggagctgcatccatcagcgcccccatgggaggtactggagtggatcgggtgcataggtcatggagggagcacagattactcccctcttctcaagagtccagtcaccatctccagatccatgtccaaaaagtacttcttcttacaggtgaactatgtgagcaacaaacacatagccatgtattttagagcaaaagacacagtgaggaaaccacagtgtgaactcatacccaagcctccctgtgggggtgcataggacagccagggttactcaggacaccaggctccctcaggacaccaaggggcactcaagaccattgtagaggcatgcaggtagctgggggctctcaggaaccatgggggaaaatcaggacaccaaagggtgcttggtacagcagggggctcaggattattgtggggattcagaaagagcaggttcaaggctcaacctcagggcatgtgcagctggtgtgaaaaggggctggatgaggcgttttgtgtcaccatcatgtttcaccaccagacaccctccactacctctattctaatgcatgtgtttgtatgattagaaaatgatattgatataaatatataaccatagctaggtgtgtcaagttgtcctctccatcttatatcagccttgtctgtaaggactaattccccataattacttgagaacctcataaattgtggtcaattatgtaggattcctctctttttctgccttccttcctccctccttctctctctcacacagaaacttatatacagccaccccacaacacacataaatctataacttttattacctgatgtattgataagtaatctaaagttacataaaaatcagtagttcactgtcaatattgtaggagaagggaaggtctaggaaggaggaattacagaacaagaggatattttgagggtaattgacttgttatctatgtggataatgataatgtctatgaccatatttgtaaaattgaacacttcgtgtggagactattatttttttatttaaccccatgccattattttgccgtattctagcatttctctaaaaatacagaaatgttcagcactcattcatgtgtatattcaggagtttctgacttttcatgtattttatttatctctgtctaattgctttgataccaaattttacctagtataattagtactacctttagcactgattataagtctcactcctccatcatctccttttttgccacacaagctgaatctagtttggactcataggagctgcttcattcaatgccagtgggagtttcaaaccctatcaacccccctataaactgtcattaagaaagtttatcaaactccaccagtcatgtgatattagttcgttttcacagtggtataaagaactacctgagacgaggagtttacaaagaaaagaggtttagttgactcacagttctgcatggctggggaggccacaggaaacttataatcatggtggaaggtgaaggcgaagcacggcacatcacacagcgcagcaggagagagagggggaagtgacacatagttttaaactatcagctcttgtgagaactcactcactatgatgagaacaacatgggaaaactgccctcatgatccaataacctctcacctggtccctcccttgacatgtggggattagaatttgagatgatatttaggtggggacacaaaacaaatctatagcacatgtccagctgtgtcctggagttgtttcagggatccagtgtgtactgttgatagaaacagtgatcatcattctagccggtgtgagatggtatctccttgtggtttagatttgcatttctctgatggccagtgatgatgagaattttttcatgtgtcttttggctgcataaatgtcttcttttgagaagcgtctgtgaaaaaaaaaaagaaacagtgacaccaagctcacaccatccgttgtagttgacaacatgcaaagccaagagatctcaactgagatttagtgtgtgtgtcatgtctgatgaagtcataagctcagagcaagtgaatatggaaaagtgtattatctgcacagtgtaggtgtctgctgagtgcagggcaggtctcgcaggaaaatctaaaatggcttgaaagaagaggaaaggagactggctcagggtttttataatggtttagtggtggtggcacagtgaggcttcccactcacagatcggggtttataaggtttgaaactcccactgccattgaatgaagaagctcctgtgagtccaaactagattcaccttgtgtggcaaaaaaggagatgatggaggagtgagccttaagtaatcaacaggcatgcaccaaaagatagagcgacaacttattctaggtagcaagaataaaaataatgaaaaagaaataagggttcagtatgggtggacaagacccagatctacagaaatgagatgactttagaaatataaggaaataataatgagaaaaagaaggaggggatggggaattagggtcctggcctaatgtcttgggtagaagcttctcacaatcaaggactatcagcttattctgcaggtcttgggtcacacgtctgcttaaaaacatcagaaatgccaggcaatcaatgaggatgctcagtttagcatctcctatttgagtagatttacagttgtgtggaattcttaattgattctttttggtttgtttttagaggcaggctctcacactgttccacagcttaaagtacagttgtgtgatcatagctcactgtaattttgagctccggactcacgtaatcttcctgtattagcctcctgaatatctagaattagaggggaacgccacccctcacctgcttattctttaaaatattttttcatagaaatagcatctctttatgttgcccaggttggcttcgatttcctggtctcatgtgatttccctcactttgcttctgaaagtggtgtgattatagggaagatccactgcatctgtcctgaattgattcttcagttgtaaaacatgaagccaataattaactgcctgactgttttgtgcagtgagttagttaaaagtttctgataagattccttccaatatgattcaagagcagtattttctgctgatgttcctttcagtttccttgttgaagatcagaagacactgcggaaaagatgtagtaaaaaggcagttttaactcttcatgattggagtggatatcacataggaatccctttccgtattttgtaacacatgcatgcaatagaacaaagatgatcccttggtgtaaaatctataaacgtatgggccttttagctaccaagtcatagggtaataactgatggaccctgaggagtgaaccatgattccatagtgctagtgggagaacccttggccaaggaagtttacattttattaaaattgataatttttatgtagcgatgccattttttaaacattcccagaaggttgtgagtgggattgactctgtcttctgtgaacaatgacagtgccctccatggttagataatattttaaactagattgagctagagtggtttctgtattgaatcactatatttttttagcttcatgttagctttttgtgtgttagcatttgctttaaaatgatattaatcagccctctagtaggtagaaattcatctgagggtttcttcccttgttgtccatctcaataggatttccagaagacgtaagaaccctctctgtttctaaaaatattccaggctgggcgctgtggctcatgcctgtaaacctagcactttgggaggccgaggtgggtggacccctcgaggttgggagtttgagaccagcctggtcagtatggtgaaacctcatctctactaaaaatacaaaaattcgccgggcatggtggtgtacactcgtaatcccagctacttgagaggctgaggtgagaggattgcttgaaccctggaggcgggggttgcagtgagccgagattgtgccactgcacttcagcctgggcgacacagcgagactccgtctcaaacaaaacgacacaaaaaattccaaagttgtgcaccctctaaaagcatatgtacttaattctcatttttaatttattaaacatctctaataagttcaatgtttcctgccttctgagttgatttcctaacacatagaagaatatatcctaaatgaaagtttgtgttcttaatacaaattactagttaataacctttacttttattattgaggtattatacatcaatgttaatcaatcctctcaatgggactcttacctaaagaatatataaaatattttcctgatcatgacatataatagatgtgaacacattcttagcattcagccatgtctcttgtctattaatattataaaccacatgctaactttgattttattggtaattgttctaatttcttttttttcccacttctctggttgttttttttttaactttaagttttagggtacatgtgcacaatgtgcaggttagttacatatgtatacatgtgccatgttggtgtgctgcacccattaactcgtcatttaacattaggtatatctcctaaagctatccctcccccctccccccaccccacaacaggccccagtgtgtgatgttccccttcctgtgtccatgtgttctcattgttcaattcccacctaggagtgagaacatgtgttgtttggttttttgtccttgcgatagtttgctgagaatgatggtttccagcttcatccatgtccctacaaaggacatgaactcatcattttttatggctgcataggattccatgatgcatatgtgccacattttcttaatccagtgtatcattgttggacatttgggttggttccaagtctttgctattgtgaatagggaattgttctaatttcaaactagttaatttttatcttcatgcagctagattattatgtgtggctatttattccgagagggataaagacaacattaacaattttcactgcaggcatgtctaggcaactccctgtgcactatgaccctggggcgttggagattctatggggactcttccctacctgcctaggagagttctctgccttctacctctagcattttcctctttgaagaagtacatctaactgtcattagaatagagacaaagacaagtcttaactgcttccagctgaggagggatgctgtttggggaagatctctcttggaggtctaagggaccccaggaaaagggagccattatcccaggcttcagttgcatgaccatttggagtttgatggtctgaaaatgagaagaggcaaatctggttattagaagacatgtatgaaaaccaaacaaggtggcaaggacagcttgaaagaaaattccaaggctgctgacattcctagataactgcagctgtagttatgcctgctaaggtttgggcgcatggggcttggcttttgtcagctccctgggatttattttcccaaacaaagaaacctccaggttaggggcaccctattcattcccatcacctggcatgatttaaaggataattgcttagaattaaaatattgatccagattttttatattccccatcgctttttgtttcttctgggctgtagccagagatcattgattggcgctcaggaataagcagagttagtctaaaatgcaggcaaatacttaaacaactgaagagattagaatttaaagacaagtgtatgatatgttttgaaatacaatgtttctctttccagttttggtttttgtcggcagcaaataatgataagactgagttgtttgcaaaataaactttagtcttaaacttggcctgattatttgcataaagtgcagcaagaatattaataataattctgtaggaaaagcctgcaagcaccaggagcttcacagtctaacactatgagcacgtgcatcctcacgcaactcactgaatatttccaagccagcctgttccgatcttaaatgccatccagtggcatctgccccaggtacactaatacatgggtcctgcttctctctgcagcctcctctctcctcagatttcaggttttgtttattgtttgttttctctctgacatcaacacagatatgttgaaggttttcttttttttatttgtagttgttcagctttgttgttaatgaggtcagaataagctcatagtttacacatttttacattcccatgccgagtagctgcttttctctatcaaatccattaactgagagaacaatcacatttcgttacaggtgaacagttaaatagtttggcatatatttctgtgctggaatctaatgcagcttgaaatcaagtcatgcctcactcattgaaaaaaacatggctaaattctcaaagaattgtgctgagtgaaagaaactaaggaattaagagtaaattttacatgatacatttgtagaaattttagaagatgccactattataaattaacatggagaagatttaaatgtttctgagaatatgctattgggagtaatggggatgtgagttaaatttcagaggaataagagaaagatttagggattaattttttcaaaccttgattgaagtgctgagtaaatggttgcaaacataggtctacatttttcaaatcattcaccataaatttgaattatttattaattacactcgaataaagcaataaagaaactgatgagataatatttgactgaattgcatcaataaatagatcgatattaacacaaggaatataactgatttccaaaaacatacacatgaaccatggttcactctgcgtatttagataaattacagaaagttgtcataacagatggggaatcctgcagacttcactaggcatgggccatgctgccctggagttgtctcaggggagctgcctcctccagaggttagagcacaggcccaggtaataggactaaatttttagatgtgttatcttagacacactgcacaactgctgtgttctctatgtaaattatctcctgtaaaatataacattgaagcctgcattaaatatattgtgtaaatatgtaagaataaaagaaagttatgagagctaagtgttaatcaaggcacaagcatataagatataactatattttcctgaatgatggaattactaccagtctcccccaggacacttcatctgccctgagcccagcctctcctcagatgtcccacccagagcttgctatatagtgggggacatgcaaatagggccctccctctactgatgaaaaccagcccagccctgaccctgcagctctgggagaggagcccagcactagaagtcggcggtgtttccattcggtgatcagcactgaacacagaggactcaccatggagtttgggctgagctgggttttcctcgttgctcttttaagaggtgattcatggagaaatagagagactgagtgtgagtgaacatgagtgagaaaaactggatttgtgtggcattttctgataacggtgtccttctgtttgcaggtgtccagtgtcaggtgcagctggtggagtctgggggaggcgtggtccagcctgggaggtccctgagactctcctgtgcagcgtctggattcaccttcagtagctatggcatgcactgggtccgccaggctccaggcaaggggctggagtgggtggcagttatatggtatgatggaagtaataaatactatgcagactccgtgaagggccgattcaccatctccagagacaattccaagaacacgctgtatctgcaaatgaacagcctgagagccgaggacacggctgtgtattactgtgcgagagacacagtgaggggaggtcattgtgcgcccagacacaaacctccctgcaggaacgctggggggaaatcagctgcagggggcgctcaggagccactgatcagagtcagccctggaggcaggtgcagatggaggctgtttcctgtcaggatgtgggactttgtcttcttctgacagttccccagggaacctcttaaatttagaaaactgtgcctaacaatgtcttctctatgcatatgaggaccttttctccctggcacaaaatgcagattgacgctgacacggatgaaaattcctcaaccatggtcacaaggatcagagtcctgagtaacctcagggcttcctggtgattcttctccaatcagacccaggacagggacctccgtgagattccctgactggaacagtctttatggatcctggtcacagacaatagagaggctgaaccagggtcagcgtcatgtagaacgtcacagatttcacgtctgatccttctcctgacacgaaagtatgcaaatcagtatcagcaccgatctggtgcttcttttgttcctaatccatttactttcttttttcgtcgtttttctcctttttccatttgtttttcctgctttttgcaaaaggaagatgttttccctgtgagatgcaggggatgacaattttgggagatggctggaacatccaatatcctcagggccgaccatcagtaagtgcaggctagaagtctcagaaagagctgaagctgcttaatcaccgtggagttttaccttctccagttctgctctgatggaatcagggccaagcaggttatcaatgataatctacctaacatagagtcaactgattccagtttcaataacgtctgttaaaaattcacaccaccacctggattactgttttgtcaaatcaatacacagtattgtccagctaagtagacccaaagacggaccgttgcccatggagaaaaacattaacctgagttctaggttcttacagtgttaaaggtgtaaaactgattattaaaaatgaggctatttttctttttgctgttgagttgtagaagtttcttttccattttgacatgaaaactttttcagatatatggcatattatccaattctgtaagttgtagttattttgttgctttgcagaatctttttcataatctattcccacttgttcaattctgcttttttttgtaggtgatttgaatgtaaaatcctgaaaaagattgctaattttttgagtgttgagagttttacaattagaggtattacagttagatatttgaggcatttggagtgaatttttgtgtttattctaacctaaaattcttaattcttttcatgggaaaatccagttttcataccaccctctttggaagacactacaatttagccatgttatattgatggttctcatgctaaaaatcagcttgtcatcaatatgtgggtttatatctaagctctatataggtatttaagccaaaactttctatgtttttaataaatgttgaggcctggaagtgaaatgcctaaagctttcttcttgccttgttacagatattgtaccaaaatattctaaccttttactattgagtgtaataatagctgtggcctttcttaacggcttttattatgttcaagttgttttcttgtcttcctactttgttcatagttttaataatgaaactgatttttttcaaagtctttttctgtgtctgatgaaatgttactgagatattttttctttagttttttaatgtgtaccaaactgattgatttgagaatgttgaatcaagtatgcatctcaggaagaaatttgagttggtcatggtgtatgtcttctaaaacactttggagcttagtttactattgttggggattaattcatgtctactaatgatattggtctgtagtttcctttattgtggtgcctttgtctattactggtaatactatcatggtagtctcatagaaagagtttagaaggtgtatggcagactacctttaaaatagattttatcagtggagaaatggtgatagttttttcttcacttttctgttgggaagaattttatgttgtttaaaagatattcagaatgacttaacctggtttatgagctttcattctattcctttcttccattctttttgaagaactgcttacctttcctatttatttttaagtttgtttttagacatatgcaatacattttgaggtgaaacctggtggaattttttccaataaattagtaaaaataaatcatttaattgactattttattcaggttgatttgtttaatatttgctaaaggccagttctttaagctatgacacataataaatcccaaatggcagtacctcattgtttacttagcttttgtacttatatttttcagaggaagaaccactactgtaaattgtaaatagccaatacataattgtattgtatgcaaatctgtgactgtttacagtgtcatctctgagaaacataaagtttatttactatatatatataaagagtttggaaggtggactccaccaatttttgaaagagttacagaagggctgctattacttctttaaatgttaaggttcattttatgatgtaacagataacctatcatggagaatgttcaatgtgttcttgagaaggatgtgtattacgtgactcttggttggaaggttctgtaaatatcattcagataaatttgttcaatagtgttgttcaagttcagaggcacattgagaattttctttctggatttgctaaacattatggtcatgaggtattaaggtcttgtgttatttttgtattgttttctatttctttatatctcttacagtttgcttaatgcagttatatttgtatttgtacacatgtgtaaaaacaaaaatcataattgctaaatgagttttatggcacagtcacattataagtaatatttttccaaatgctaccattgccactaaagtcctcctggagtctgacgtctgctctgggcactgccttcttctcaggcgtcccacactggagcttgctatagaggaggaggcatgaaaacagggccctccctctcctggtgaaatcaagcccagacctgaccctgcagctctgggagaacagccacagccctgggattcccaggggtttccatttggtaatcaggactgaacacagagaactcactatggggtgtgaattaagctgaatttttcttgttggtattttaaaaggtgactcctagggaactagagtgagtgagagtgagtggatatgagtgagagaaacagtggatatgtttgccagtttctgaccaggatgtgtgtgtattttcaggtgttcagtgtgaggtggagctgatagagtccatagaggacctgagacaacctgggaagttcctgagactctcctgtgtagcctctagattcgccttcagtagcttctgaatgagccgagttcaccagtctccaggcaaggggctggagtgagtaatagatataaaagatgatggaagtcagatacaccatgcagactctgtgaagggcagattctccatctccaaagacaatgctaagaactctctgtatctgcaaatgaacactcagagagctgaggacgtggccgtgtatggctatacataaggtcccaagtgaggaaatatcggtgtgagtccagacacaacatttcctgcaaaaagaagaaaggagtctgggccgaaggggacactcagcactcacaaaacaggtgcagccccaaggcaggtgcagatggagggagggtaagggctgctttccttcagggtctgtggtttcctctgcttctaatatttcccctctgaacctctgtatatttatgttttgtgcccaccatgaggtccctggattagaaaactaatttaaaagaggaaatattctcatatgtcccaaaaacagatgtaagttttggaggcataaaaatgcataggagccgcgtgagtctgtagacactgccaccccacaatgccagacccaaaactagtgctggagaagggtgggagtttgatggagcttccctgatgaccccgtggtccaagctaagtccagcaaggccattggtgcctcgctgagcacagttgtccatcagggatctcccatgtgtcccagcagcagccatgcctcagtatctccactgtgcacagccatcgtctgggaggagctcccaggatgggtgtctttggcacacacaggtgatgggtgttagagtgcagtgcagcagctggctgcctggtctattgggctcctggatattggagggattggaggtgcattctcaaggccagcacgctgtttgttaatttttgtataaaaaccatgtgatttaattcattttctcagatgacatagataattaataacacaatctgcaaacaattgtaattttcaactttaccccaagttcattgtttcttaattctgtgcaggatccagacatggtattgcccttctcatgagaaattgttcgacctaaactgaaaccagttgtttctcgtatactttggttctccccacatgcagagatcttgattagagcaagtttggtactttccacgcactcaccctcacctccccagataaagagcagaagttctccttagactgagtctgagggaggagctgttcctgtaccactcagggcctgcggagacccccaggtgcagcttcactgagtcaggtgtttcactccctgtgattgctgctcaggtctaattgtgggctcagaattaggacagtcttcaggttatcacaggtcaatcatattctaaaaatcatcattatcacacaccgtggtaataattcaatgttcatttttctaaacagcagtttctcttttttatttggttgcaagtctgaggaaaggaacatgtgataatactttttaatctaacctctaaatctactgaattgttctaggagactcacaaatcggacaaagtgagctctttatgctcataaaaaaatgcatgtatttgggaatttcaccgtgttgtccaggacccgttaacatggacaactgtgtttcgcagtgcacttctggcttgagacatcctcacagaccctctccctcacctgcactgtctctggattccccatcataaccagtgtttccttctagaattgtatctgcttgcccctagaagatggacaggagtggatcaggtgcatgggttgtgaagggagcacaaattacaacccacttctcaagagtccatatccggatccaagaaacagttcttacagctgagctctgtgcccagtgaacacacaactacgcattttgaagcaaaagatgcaatgaagggccttcattgtgagcctagacacaaacctccctgcaggggtgaataggagcagcagggggcattcggggcagtatgggggcttaggatgattgttaggggtcaggatgagcaggaccaaggcttcgcatcagggcaagtgcaacagggcagaaaaggggctgtagatgtgggttgttctcaccatcatatttcaccaccagacaccctccactacatctcttctaatgtgtctgagtgttgatatgattagaaaatggcatttatgtaaatactactatgtacccatatggaggtgcatccagttgtcctctccatcttatgtggaccttgtccatcaagcactaagtccctgtaattacttgagtacctcacacattatggtcaaaagatgtagggtctccttttgacatggtctctcctcctgccttctctctctgtcacacaaaaacacgtgaactgacacacacacagagcttcccaactttaattatgtgatgtattgaagcaaattgattagtgtgcagcttttctgctttgcctgctattcatgttatgtaaaaataagaaccatgtttttctcagcttgtcacttctctaagctaagtagcatctttgtttattatacccagagaccaaaagcgatccaactgttattcagcagcttaactggtaaacaaattgtggaaaattcatttactggaataatacccactgttacaatcaagtactgctggatacactcaacaccatgcttaaaataacaagcacctgaataagtaaaataagtcaaacaaatgaaagtgcatacatacgattccacttctataatttctataaagtaaaaatgaacttaaagttacatgaaaagatctgtagttgactggggacatggtacaagaagagaaggtatagaaaggagaaactacaggagagcaaaaggaaatttctaggataattgattttttctctgttagtaaaagtgaggattatgtcactatttgtaaaattgtacactttatgtaaagattcttatttgctaatttcatctcattaaaatattgcaattttttaaatgtctagtttggtagaaaaggtagtagagagagatgaataaaatacataaaattcagagagtcctgaatacacacatgaatggaccctgggtctcactgtactttgagggagacactagaatacaaaaacataatgacaggatttcagtacatgaaaggagcttctcaaaccccaggaggcatgtccaactgcatcttggagttaactcagggagcaggcatgtcctttgaaaggagccgtgacaccaagctcccagcatccattgtagccgacaccatgccaatgccaagagatctcaactaaaattttctgtggatgttgagtctgattatgccacacactcacaccaagtgagtatgcaaaggatagttacctgcatccttaaggtgtctgctgagagcagggcaggtctctcattaaggtccaaagtggcttgatagagcagggaaggagactggctcagggttgttatcatggtttggtggggagtggggcagagcatcgtacttgcaggaagggttttgtggggtttcaaggtcaaattggcatgaaaagagggagctcctgtgatttctaactagatttaccttgtatgcttaaaaaaagagatgatggaggaaagagcctgaagttatcagcagtcaggcctaaacatagagtctgatgacttactctaaatagcaagtatacaaatgatgagtaagaaaagagacaagactccaatatgggtggacaacagccaggtctgcagaaaatgagaagacagtttataagcaaagaataatgagtaggaggaggatatggaggaggattctggtccaatgtcttctgtggaagcttttcatgatttcagatcatcagcttattctgaaggtcttaggtcacctgttttcttcaaaatatcagaagtgccagatgatatgtgaggatgcgcagtttaatttcctctgagtagctttacaattgtgtgaaattcttaatttttttttgagatggagtctcattctgttgtgcaggttggactacagtgctgtgatcataacatagctcatggtgatttcaaattcctggctcatagaatcctcccacctcaacctcctcactagcaagtagctaggtttccagggcgcttcatctacacttggccattcttgtcattctttttttttttttttttttttttaggtggattttccctcttcttgcccagactggagtgcaatggtgccatctcagctcactgcaatctccccctcccaggttcaggtgattctcctacctcagcctccagagtagctgggatcacaggcatgtgacaccatgccccgctaatcttgtatttttatcagagatgacatttctccatattggtcaggctggtctcaaactccctacctcaggtgatccttccacctcagcctcccaaagtgctggaattataggcgtgaggcaccgcaactggcctcttcatttttattcatatgttccttcagcagccactatgtcttcccactgatttcttcagtttctgccttttccttttgaataaggctgttactcctgagggaagatgggaggtgggcctggacagggacttggtgcattcctctctcctgtcccagttcttattggtttctccagtgtctgtagaacagtggttttggtggctttacctctgcagataatttctcttgcaatgtagtggtgatggggaggtgtgtctggatgcatttcagctatagttgctgttttgctttcccagacagcaccatcccaaagggtagaggctggagcattttgtgatgtatccccagtactgaagaaaaaggcttcaatagcaggaggaattcctcaactgtatacactctgagaatttaaacaataacttctctatcacactcaaattgaaaccatccaatgaatatgtctactttaatcgtgtgctaacttaaatggcatttggcagcctctgtcccagaaaagattatcatctgctcctgtttatttccctgcacgtccttatctctcttcagatttcagatatattgtttgtcctataacatcaaaaatttgatgtatatgtgctaatttgcagatcagtaagtttagtagctgttgtaagaataataacatatttttatcgggtgcttacatctccaagctgagaagcacctctatgtgtaatactaagaaactagaaatgatacaaatatcaagaagatacatagataaaaagtaatggcatgctaatttactgtaataacatccatcatgagaatcaatacattgttgatgctcaacatgtttgcatcataagtagttacgtgcgagaagccacacaaataaaacacatactatataattcctgtataataaattcttgaaactcaaaactaaggtattaaatgtgaaggactgactcagaatatggtgggggaagaaaataattgggaaggaggaattgtagagcaacacaaggaaacttttaagtgtaatttgttcattatttggatggcttttggggatgcacaggtgagcacgagtggaattacattgtgttttgtttgtttcttttttttttctgaagagatgtggtccttctctgcgacccaggctggagtgtagtggtgggatcatagttcaatgtagcctctaacttctggtctccaacaatactcctgcatctgccatctaagtagctggaactaccgttgtgtgccaggaggtttggcttggcttgagtacttattaaaccacacactttttgcaatatttaatgtatagtaataatgtctcaataagactactacaaatcaatgaatgaataatttgttcagtacagattcatggaaaaatagacactaacatgatgaatgtctgacatttatgaaaatacaactgcatgaaatgtgcttctctttacattcattaggtaaacacaatagtgcatacacatcacaccgtgctttcattacaggaagaaagatctgaaaatgtcactggggtgaaccacattgtgctgggcttggttcagggagcagtcaggcccagtgttgtgaccttcaaccacagaatccttaaaaaataataaaagaggctcccccaaagtccccatcagttcccggactcgctatgtttctggatcgtatcagtgcatccggagctccctggtggctttagtgattccttgcttgccatgctgaggtctccctgtagattatgttgggttttctgaggccgttttgctatttaagacccactccctggcacagagcgattccctctaaacctgatagaggttctgaactaaaaataacattaagtgaatcctggtgtgtctgaactcaagtgattgttacattaagctgctgttgcaatctgtttcctcacctgggaaaagaggagccaggacatagtgagttgaggccccaggaagataactgaattctcagagggcacagccagcatcctcctcccagggagagtctaaaagactggggcctccctcatcccttttcacttctccatacagaggcaccacccccatgcaaatctcacttaggcacccacaggaaaccaccacacatttccttaaattcagggtccagctcacatgggaaatactttctgagagtcctggacctcctgtgcaagaacatgaaacacctgtggttcttcctcctgctggtggcagctcccagatgtgagtgtctcaaggctgcagacatggagatatgggaggtgcctctgagcccagggctcactgtgggtctctctgttcacaggggtcctgtcccagctgcagctgcaggagtccggctcaggactggtgaagccttcacagaccctgtccctcacctgcgctgtctctggtggctccatcagcagtggtggttactcctggagctggatccggcagccaccagggaagggcctggagtggattgggtacatctatcatagtgggagcacctactacaacccgtccctcaagagtcgagtcaccatatcagtagacaggtccaagaaccagttctccctgaagctgagctctgtgaccgccgcggacacggccgtgtattactgtgccagagacacaatgaggggaggtgagtgtgagcccagacacaaacctccctgcagggaggcggagggggcgggcgcaggtgctgctcaggaccagcagggggcgcgcggggcccacagagcatgaggccgggtcaggagcaggtgcagggagggcggggcttcctcatcagctcagtgctctccctcctcgccagcacctcagctgtccccaggactcctctttctttattatctgtggttctgcttcctcacatccttgtggtaggaaaggaaggaggaaggcaaattttcctcttagagtcaaagtgtcactaattactaggaactttcctacaagttcctgaatgtcccatttttccttcttaattaaaaaaaatatatattctaatacttctcaccatctcttgatttgtgtcatcagttgaattgtgctgtctttgaaattcaaatgctgaaaccttaaatccaattgatctatattggaattttaaggatggaattaaggttaaatgtgatcataagtctgagattctaatgcaatagatctgttgtctttataagaagtggaagagtcaccagagacctctcacttttcccgtgcacgcagagaagaggccatgtggagacatagtggactagaaggtgcaagccaagaagaagccgcaccaagaaccaaccctgccagcacctggaccttggacattcagacttcagaatggtgagaaaatcaatgtttgttgtttaagccacccactcctgttgtcttcttatgaagacccagacagactaataccacataactctgttagctcctggagggagaagcagctccctgaggctgggcacatctctcagatatccatatgaagtaggcagaaatagtagttctcatataaaaatgtgtcatggccctgttggccatttttttttgacggagtctcgctctgtggccaggctggagtgcagtggtgcaatctcagctgactacaaaccccgtctcctgggttcaggcaattctccttcctcaacctcctgagcagctgggactacaggtgtccaccaccatgccagcctattttttttttgtatttttagcagagacagggtttcactgtgttagggtggtctcaaatctcctcactgcatgatctgcctgcctcggtttcccaaagtgttgggattacaagtgtgagccaccgcacctggcccctgttggccattcttggggcaatgtctctgaaaccagccctggtgcctgtaccacaaaattttcttttatctttcatgtggatataacaaatggacaatgaggaccagctgcatggagactgaccactgaacatcttctgctgtctcctaagtaagtcacaggaaaacacaccaacatcaccaacataactgttttccttcaacttcctcgaacgaactatagaaatgatcccttaaagtatagtctattccttcaactttctcaatttgcactgaatcccttcctaaattaggagctacatagggtctgagttttgttccctttctcccagtcttccccaagtatcaaggacagaatagatttaaattaaatttggccgtccatgcccccaacaccacatcggtttctaacatccttgtcatgtacccatccttctgtgggcaccccacatcaggttgcccaggaatggccagaaggtgtcatcaccttatgggctgaggctacaagttatacacacgtgtgatttcagtcacacacactctactgcaggacacacctgtgttctgaggaactcaggcgcctgctgatctcaggtcttctctaataaattacacacctcttatgaatgaaggtccagatggccccatcagctgcagagcagtggattaaagctcatgggtgggtcagtcaggcagaagtcagacaatgggataatagaagtcagacaatagtcactgaggttcccaatgtattttaatggaataaaacaatattagcaacaaaggggcagtaaagaagactggctcttgaaggtatttaaggaccaggaactttatttggggggaaagtgagagacacttttacatggaaagccctaaagcacatacagcagctgacagagtggccactgtgcacatgagggctgaggagacggatgataggttacgttgctccaagatgtccctgggtgtgtgatggttggactcctcatgcatatgaaaataagagctggactcagggagaaacaagggccataccccatagaaaaggaagaaaaaaagcagatgggcacccctggagagagctcattagatttggtaggtttgagatgaaaattacttccaaaggttttaatgttctaagctaaatatgaatctcttcaataaagtgagaattaaaagaagaatggagctaggagttgagagaggaaacaaattatgagagagcagaaagcaaatccacccaaactgtcacatgacagaggccagaatggagctgatgcagctacttcactattctgcagacctagttgaccatgtggagaaggggttcgaacaaacggggatgttctccaaccttccaaaacaacctccttcttatgcatatgcagtaatcatgattctcagggtggccttcccaagtttcctgttcttacctcttcccccaggggtagagtgtcttttccaacccacagtggtttctctgccatgtcctcagcttctcctccattgtacttaacctgaagattaaggatttcatctggatggagtttcctgggaatcctctgttttctttggtttctgatgaccacatcacaggccataggacacaggttttagtggatttcccctggagacagtggaggtgaatccaggcgttccacagtccttaccgttcttctcttcctgtcagcaccgcaggacagcagataagggagctgactgtggatttttcagatccccgggaaaaagcctgcaaggactaatagtttcacatctaacaccattagcacatgcatccaaaattaaaaaaaaaatcctcactaaatatttccaggttagcctgttcctctctcaataccataccgtggcacctgccctgggttcggtaacatgtgggccccagtcctctctgtaggcgtctgcctcctcagatttcagtcctcttttttgctccgtgaaagcaactcagatatgttaaaaggttttcttcttcatttattcataatttttcaggtttgttgttaatgaggaaagagtaagatcatggtttcctcatttttcacattcccatactgagtaactgctctctctctatgaaagccagaaattaagagaacaactcaagtatccatatccattacaagtgaatgttagacaatttgatgtatgattatgaactaaagtacaacacaggattagaatccaggcatcctcattctcataaaatcatggctgcattcacaaataactgtgctgagtgaaagtagctaacaaattaacagtgcacttcataaacttctatttgtataaactgcagaaggtacagctattctaaagcaacagagaagattacatattggtgggaactgggttttgaaagtaatggggtggtgagatgaaattacagagaagtgacacaaagatttaggtgtgaattgtacacaaattaattgaagctctgattaaagggttgcacacatgttaccattttccaaattatgcagtatatatttgaattaattattaattgtatttaaataaagcagtaacaaagaaacaaatgaatacatttattgaggtggagccaaaactaaatgggaatgaacactcgaaacatctctgactcttgaaaatacacaagcgtgaacactggttctctctatgtatttcaggtcaatagcagaatacactaaaagaaaacagagatgtcctggcaggggtggaatcctgcagacctcactaggcatgtctcacactgccctggagttgtctcaggggagcagtctcctctagtggtcagaggcacaggccgagataatggggctaactctgtccagctgtgtgaccttgaatgcattgtataaacactctgttctctgtgtgatttatcttccttaaaatgtgacattgacacttgcattaaatgtattctacaaatatgtcaaaaagatgatgactgctaaatgattatcaaggcacaatcatataatataatgatattttcctgagtgataagatgactaccaatctcccccagggcactttgtctgctctgagccctgcacctcctcaggattcccatcccagagcttgctatacagtaggagacatgcaaataggtttctccctctgctgatgaaaaccagcccagtcctgaccgcacagctctgggagagaagcgccagccctgggattcccaggggtttctatttggtgatcaggactaaagacagaggacccaccatggagcttgggctgagctgggttttcactgttgctgttttaaaaggtgaactagagagattgagcgtgagtggatacccttgagagaaatggtggattatgtctgggagtttctgaccaggatgtctacgagtttgcaggtgtctagtgagaggtacagctcgtggagtccggagaggacccaagacaacctgggggatccctgagactctcctgtgcagactctggattaaccttcagtagctactgaaggaactcggtttcccaggctccagggaaggggctggagtgagtagtagatatacagtgtgatggaagtcagatatgttatgcataatctttgaagagcaaattcaccatctccaaagaaaatgccaagaactcactgtatttgctaatgaacagtctgagagcagcgggcacagctgtgtgttactgtatgtgaggcaccaggtaagaagacatcagtgtgaacacagacacagtttcctgcaatgataagggaggaggctgggctaaaaggggcactcaggacccactgaaaacgggcagctctagggcaggtacagatggttatcatgggctgctttccttcggggtctgtggcttcctctgcatctaccagttcccctcggagcctctggacatttatgtttctgtggccacccctgacatctctggattagaaaagtttattataggaagaggaaacattttcatttgtcccaaagcagatgtaagtaatggaagcaaaaaatgcacaggaggccaggtggggctgtagatactgtcaccccagaatgtcaatctcaccactagtactggagaggcatgggagtttgatggagcttccctaacaactctgtcttccaagataagtccagcaagaccattggtgcctcccagagcacagttgtccatcagggatgtccaatgcttcccagcagcagccatgcctcagtgtctccactgtgcacagccactgtctgggaggagctcccaggatgggtgtctttggcacacaccaggtggcgggtgttaagagtgcagtgcagcagctggctgcctggtctgttgggcctgatgctggagagatgggaggtgcattcttggggccagcatgctgtttgtgaatttttatataaaaactctgattttacttcattttcgcagatgacatagataactaaaaacagaatctgcaaagaaattgtaattttcaactttaccccaaattcattgtttcttaattctgtgcaagatccagacatattattgccttcctcatgataatttattctatgtaaaaccgaaatcattttttctcctactctttgtttctgttcaagtacagagatcttgagcaaagtaagttgggttctttccacacactaaccctcaccttccccagagaatgagcagagattgtcctcagtctgagtctaagggaggagctgtttctgcacaactcagagcctgcagagacccccaggtgcagcttcagtgagtcagacatttctccatgtgggcgacctccagtgcctgtgactgctgctcaggcctaattgttggttaagcattaggacactctttaggtgatcacatctcaagcctattctgaaaatcaccatgatcagagatagttcaatggccattctcctaacataagtttctctttattacttggttccaagtatggagaaaaatgtgaccctatatttgtctgaatccaacatcagcatcaactgcattatgctaggagactcactaattgagcacaagtgagctcgttattctcatagaaatgtaagtatttggaaatttcagtgtgttctccagaacctgtggctgccaacaactgtatttctcggtgcactcttggcctggtgaagccttcacagaacctctccctcacctgtgccatctctgcattctccatcacaaccagtgtttccttctggagctgcatccatcagcgcccccatgggaggtactggagtggatcgggtgcataggtcatggagggagcacaaattactcccctcttctcaagagtccagtcaccatctccagatccatgtccaaaaagtagttcttcttacagctgaactatgtgaggaacaaacacatagccatgtattttagagcaaaagacacagtgaggaaaccacagtgtgaactcatacccaagcctccctgtgggggtgcataggacagccagggttactcaggacaccaggctccctcaggacaccaaggggcactcaagaccattgtagaggcatgcaggtagctgggggctctcaggaaccatgggggaaaatcaggacaccaaagggtgcttggtacagcggggggctcaggattattgtggcgattcagaaagagcaggttcaaggctcaacctcagggcatgtgcagctggtgtgaaaaggagctggatgaggcgttttgtgtcaccatcatgtttcaccaccagacaccctccactacctctattctaatgcatgtgtttgtatgattagaaaatgatattgatataaatatataaccatagctaggtgtgtcaagttgtcctctccatcttatatcagccttgtctgtaaggactaattccccataattacttgagaacctcataaattgtggtcaattatgtaggattcctctctttttctgccttccttcctccctcattctctctctctcacacagaaacttatatacagccaccccacaacacacataaatctataacttttattacctgatgtattgataagtaatctaaagttacataaaaatcagtagttcactgtcaatattgtaggagaagggaaggtctaggaaggaggaattacagaacaagaggatattttgagggtaattgacttgttatctatgtggataatgataatgtctatgaccatatttgtaaaattgaacacttcgtgtggagactattatttttttatttaaccccatgccattattttgccgtattctagcatttctctaaaaatacagaaatgttcagcactcattcatgtgtatattcaggagtttctgacttttcatgtattttatttatctctgtctaattgctttgataccaaattttacctagtataattagtactacctttagcactgattataagtctcactcctccatcatctccttttttgccacacaagctgaatctagtttggactcataggagctgcttcattcaatgccagtggttgtttcaaaccctatcaacccccctacaaactgtcattaagaaagtttatcaaactccaccagtcatgtgatattagttcgttttcacagtggtataaagaactacctgagacgaggagtttacaaagaaaagaggtttagttgactcacagtgctgcatggctagggaggccacaggaaacttataatcatggtggaaggtgaaggcgaagcacggcacatcacacagcgcagcaggagagagagggggaagtgacacatacttttaaactatcagctcttgtgagaagtcactcactatgatgagaacaacatgggaaaactgccctcatgatccaataacctctcacctggtccctcccttgacatgtggggattagaatttgagatgatatttaggtggggacacaaaacaaatctatagcacatgtccagctgtgtcctggagttgtttcagggatccagtgtgtactgttgatagaaacagtgatcatcattctagctggtgtgagatggtatctccttgtggtttagatttgcatttctctgatggccagtgatgatgagaattttttcatgtgtcttttggctgcataaatgtcttcttttgagaagcgtctgtgaaaaaaaaaaagaaacagtgacaccaagctcacaccatccgttgtagttgacaacatgcaaagccaagagatctcaactgagatttagtgtgtgtgtcatgtctgatgaagtcataagctcagagcaagtgaatatggaaaagtgtattatctgcacagtgtaggtgtctgctgagtgcagggcaggtctcacaggaaaatctaaaatggcttgaaagaagaggaaaggagactggctcagggtttttataatggtttagtggtggcggcagagtgaggcttcccactcacagatcggggtttataaggtttgaaactcccactgccattgaatgaagaagctcctgtgagtccaaactagattcaccttgtgtggcaaaaaaggagatgatggaggagtgagccttaagtaatcaacaggcatgcaccaaaagatagagtgacaacttattctaggtagcaagaataaaaataatgaaaaagaaataagggttcagtatcgatggacaagacccagatctacagaaatgagatgactttagaaatataaggaaataataatgagagaaagaaggaggggatggggaattagggtcctggccgaatgtcttgggtagaagcttctcacaatcaaggactatcagcttattctgcaggtcttaggtcacacgtctgcttaaaaacatcagaaatgccaggcaatcaatgaggatgctcagtttagcatctcctatttgagtagatttacagttgtgtggaattcttaattgattctttttggtttgtttttagaggcaggctctcacactgttccacagcttaaagtacagttgtgtgatcatagctcactgtaattttgacctccagactcacgtaatcttcctgtatcagcctcctgagtatctagaattagaggggaatgccacccctcacctgcttattctttaaaatattttttcatagaaatagcatctctttatgttgcccaggttggcttcgatttcctggtctcatgtgatttccctcactttgcttctgaaagtggtgtgattatagggaagatccactgcatctgtcctgaattgattctttacttgtaaaacatgaagccaataattaactgcctgactgttttgtgcagtgagttagttaaaagtttctgataagattccttccaatatgattcaagagcagtattttctgccgatattcctttcagtttccttgttgaagatcagaagacactgcggaaaagatgtagtaaaaaggcagttttaactcttcatgattggagtggatatcacataggaatccctttccgtattttgtaacacatgcatgcaatagaacaaagatgatcccttggtgtaaaatctataaacgtatgggccttttagctaccaagtcatagggtaataactgatggaccctgaggagtgaaccatgattccatagtgctagtgggagaacccttggccaaggaagttcacattttattaaaattgataatttttatgtagggatgccattttttaaacattcccagaaggttgtgagtgggattgactctgtcttctgtgaacaatgacagtgccctccatggttagataatattttaaactagattgagctagaatggttgctgtattgaatcactatatttttttagcttcatgttagctttttgtgtgttagcatttgctttaaaatgatattaatcagccctctagtaggtagaaattcatctgagggtttcttcccttgttgtccatctcaataggatttccagaagacgtaagaaccctctctgtttctaaaaatattccaggctgggcgctgtggctcatgcctgtaaacccagcactttgggaggccgaggtgggtggacccctcgaggttgggagtttgagaccagcctggtcagtatggtgaaacctcatttctactaaaaatacaaaaattcgccgggcatggtggtgtacactcgtaatcccagctacttgagaggctgaagtgagaggattgcttgaaccctggaggcgggggtcgcagtgagccgagattgtgccactgcacttcagcctgggcgacacagcgagactccgtctcaaacaaaacgacacaaaaaattccaaagttgtgcaccctctaaaagcatacgtacttaattctcatttttaatttattaaacatctctaataagttcaatgtttcctgccttctgagttgatttcctaacacatagaagaatatatcctaaatgaaagtttgtgttcttaatagaaattactagttaataacctttacttttattattgaggtattatacatcaatgttaatcctctcaatgggactcttacctaaagaatatataaaatattttcctgatcatgacataaagtagatgtgaacacattcttagcattcagccatgtctcttgtctattaatattataaaccacatgctaactttgattttattggtaattgttctaatttctttttttttcccacttctctggttgtttttttttttaactttaagttttagggtacatgtgcacaatgtgcaggttagttagatatgtatacatgtgccatgttggtgtgctgcacccattaactcgtcatttaatattaggtatatctcctaatgctatccctcccccctcccctcaccccacaacaggccccggtgtgtgatgttccccttcctgtgtccatgtgttctcattgttcaattcccacctaggactgagaacatgtggtgtttggttttttgtccttgcgatagtttgctgagaatgatggtttccagcttcatccatgtccctacaaaggacatgaactcatcattttttatggctgcataggattccatggtgcatatgtgccacattttcttaatccagtgtatcattgttggacatttgggttggttccaagtctttgctattgtgaatagggaattgttctaatttcaaactagttaatttttatcttcatgcagctagattattatgtgtggctatttattccgagagtgataaagacaacattaacaattttcactgcaggcatgtctaggcaactccctgtgcactatgaccctggggcgttggagattctatggggactcttccctacctgcctaggagagttctctgccttctacctctagcattttcctctttgaagaagtacatctaactgtcattagaatagagacaaagacaagtcttaactgcttccagctgaggagggatgctgtttggggaagatctctcttggaggtctaagggaccccaggaaaagggagccattatcccaggcttcagttgcatgaccatttggagtttgatggtctgaaaatgagaagaggcaaatctggttattagaagacatgtatgaaaaccaaacaaggtggcaaggacagcttgaaagaaaattccaaggctgctgacattcctagataactgcagctgtagttatgcctgctaaggtttgggcgcatggggcttggcttttgtcagctccctgggatttattttcccaaacaaagaaacctccaggttaggggcaccctattcattcccatcacctggcatgatttaaaggataattgcttagaattaaaatattgatccagattttttatattccccatcgctttttgtttcttctgggctgtagccagagatcattgattggcgctcaggaataagcagagttagtctaaaatgcaggcaaatacttaaacaactgaagagattagaatttaaagacaagtgtatgatatgttttgaaatacaatgtttctctttccagttttggtttttgtcagcagcaaataatgataagactgagttgtttgcaaaataaactttagtcttaaacttggcctgattatttgcataaagtgcagcaagaatattaataataattctgtaggaaaagcctgcaagcaccaggagcttcacagtctaacactatgagcacgtgcatcctcacgcaactcactgaatatgtccaagtcagcctgttccgatcttaaatgccatccagtggcatctgccccaggtacactaatacatgggtcctgcttctctctgcagccgcctctctcctcagatttcaggttttgtgtattgtttgttttctctctgacatcaacacagatatgttgaaggttttcttttttttatttgtagttgttcagctttgttgttaatgaggtcagaataagctcatagtttacacatttttacattcccatgccgagtagctgcttttctctatcaaatccattaactgagagaacaatcacatttcgttacaggtgaacagttaaatagtttggcatatatttctgtgctggaatctaatgcagcttgaaatcaagtcatgcctcactcattgaaaaaaacatggctaaattctcaaagaattgtgctgagtgaaagaaactaaggaatgaagagtaaattttatatgatacatttgtagaaattttagaagatgccactattataaattaacatggagaagatttaaatgtttctgagaatatgctattgggagtaatggggatgtgagttaaatttcagaggaataagagaaagatttagggattaatttattcaaaccttgattgaagtgctgagtaaatggttgcaaacataggtctacatttttcaaatcattcaccataaatttgaattatttattaattacactcgaataaagcaataaagaaactgatgagataatatttgactgaattgcagcaataaatagatcgatattaacacaaggaatataactgacttccaaaaacatacacatgaaccgtggttcactctgcgtatttaggtaaataacagaaagttgtcataacagatggggaatcctgcagacttcactaggcatgggccatgctgccctggagttgtctcaggggagctgcctcctccagaggttagagcacaggcccaggtaataggactaaatttttagatgtgttatcttagacacactgcacaactgctgtgttctctatgtaaattatctcctgtaaaatataacattgaagcctgcattaaatatattgtgtaaatatgtaagaataaaagaaagttatgagagctaagtgttaatcaaggcacaagcatataagatataactatattttcctgaatgatggaattactaccagtctcccccaggacacttcatctgccctgagcccagcctctcctcagatgtcccacccagagcttgctatatagtgggggacatgcaaatagggccctccctctactgatgaaaaccagcccagccctgaccctgcagctctgggagaggagcccagcactagaagtcggcggtgtttccattcggtgatcagcactgaacacagaggactcaccatggagtttgggctgagctgggttttcctcgttgctcttttaagaggtgattcatggagaaatagagagactgagtgtgagtgaacatgagtgagaaaaactggatttgtgtggcattttctgataacggtgtccttctgtttgcaggtgtccagtgtcaggtgcagctggtggagtctgggggaggcgtggtccagcctgggaggtccctgagactctcctgtgcagcctctggattcaccttcagtagctatggcatgcactgggtccgccaggctccaggcaaggggctggagtgggtggcagttatatcatatgatggaagtaataaatactatgcagactccgtgaagggccgattcaccatctccagagacaattccaagaacacgctgtatctgcaaatgaacagcctgagagctgaggacacggctgtgtattactgtgcgaaagacacagtgaggggaagtcattgtgcgcccagacacaaacctccctgcaggaacgctggcgggaaatcagcggcagggggcgctcaggagccactgatcagagtcagccctggaggcaggtgcagatggaggctgtttcctgtcaggatgtgggactttgtcttcttctgacagttccccagggaacctcttaaatttagaaaactgtgcctaacaatgtcttctctatgcatatgaggaccttttctccctggcacaaaatgcagattgacgctgacacggatgaaaattcctcaaccatggtcacaaggatcagagtcctgagtaacctcagggcttcctggtgagtcttctccaatcagacccaggacagggacctccgtgagattccctgactggaacagtctttatggatcctggtcacagacaatagagaggctgaaccagggtcagcgtcatgtagaacctcacagatttcacgtctgatccttctcctgacacgaaagtatgcaaatcagtatcagcaccgatctggtgcttcttttgttcctaatccatttactttattttttcgtcgtttttctcctttttccatttgtttttcctgctttttgcaaaaggaagatgttttccctgtgagatgcaggggatgacaattttgggagatggctggaacatccaatatcctcagggccggccatcagtaagtgcaggctggaagtctcagaaagagctgaagctgcttaatcaccgtggagttttaccttctccagttctgctctgatggaatcagggccaagcaggttatcaatgataatctacctaacatagagtcaaccgattccagtttcaataacgtctgttaaaaattcacaccaccacctggattagtgttttgtcaaatcaatacacagtattgtccagctaagtagacccaaagacggaccgttgcccatggagaaaaacattaacctgagttctaggttcttacagtgttaaaggtgtaaaactgattattaaaaatgaggctatttttctttttgctgttgagttgtagaagtttcttttccatttggacattaaaactttttgagatatatggcatattatccaattctgtaagttgtagttacttggttgctttgcagaatctttttcataatctattcccacttgttcaattctgctttttttttgtaggtgatttgaatgtaaaatccagaaaaagattgctaattttttgagggttgagagttttacaattacaggtattaaagttagatatttgaggcatttggagtgaatttttgtgtttattctaacctaaaattcttaattcttttcatgggaaaatccagttttcataccaccctctttggaagacactacaatttagccatgttatattgatggttctcatgctaaaaatcagctcgtcatcaatatgtgggtttatatctaagctctgtataggtatttatgccaaaactttctatgtttttaacaaatgttaaggcctggaagtgaaatgcctaaagctttcttcttgccttgttacagatattggaccaaaatattctaaccttttactattgagtgtaataatagctgtggcctttcttaacggcttttattatgttcaagttgttttcttgtcttcctactttgttcatagtttttataatgaaactgatttttttcaaagtctttttctgtgtctgatgaaatgttactgaggtattttttctttagttttttaatgtggtgtaccaaattggttgatttgagaatgttgaatcaagtatgcatctcaggaagaaatttgagttggtcatggtgtatgtcttctaaaacactttggagcttagtttactattgttggggattaattcatgtctactaatgatattggtctgtagttttcttttattgtggtgcctttgtctattactggtaatactatcatggtagcctcatagaaagagtttagaagatatatggcagactacctttaaaatagattttatcagtggagaaatggtgatagttttttcttcacttttctgttgggaagaattttatgttgtttaaaagatattcagaatgacttaacctggtttatgagctttcattctattcctttcttccattcttttttttttttttttttttttttttttttttttttttttgagacggagtctcgctctgtcgcccaggctggagtgcagtggcgggatctcggctcactgcaagctccgcctcccgggttcacgccattctcctgcctcagcctcccaagtagctgggactacaggcgcccgccactacgcccggctaattttttgtatttttagtagagacggggtttcaccgttttagccgggatggtctcgatctcctgacctcgtgatccgcccgcctcggcctcccaaagtgctgggattacaggcgtgagccaccgcgcccggcctcttccattctttttgaagaactgcttacctttcctatttatttttaagtttgtttttagacgtatgcaatacattttgaggtgaaacctggtggaattttttctaataaattagaaaaaaataaatcatttaattgactattttattcaggttgatttgtttaatatttgctaaaggccagttctttaagctatgacacataataaatcccaaatggcagtacctcattgtttacttagcttttgtacttatatttctcagaggaagaaccactactgtaaattgtaaatagccaatacataattgtattgtatgcaaatctgtgactgtttacagtgtcatctctgagaaacataaagtttatttactatatatatataaagagtttggaaggtggactcctcaccaatttttgaaagagttacagaagggctggcattacttctttaaatgttaaggttcattttatgatgtgacatataacccatcatggagaatgttcaatgtgttcttgagaaggatgtgtattacgtgactcttggttggaaggttctgtaaatatcattcagataaatttgttcaatagtgttgttcaagttcagaggcacattaggaattttctttccggatttgctatacattatggtcatgaggtattaaggtcttgtgttatttttgtattgttttctatttctttatatctcttacagtttgcttaatgcagttatatttgtatttgtacacatgtgtaaaaacaaaaatcataattgctaaatgagttttatggcacagtcacattataagtaatatttttccaaatgctaccattgccactaaactcctcctggagtctgacgtctgctttgggcactgccttcttctcaggcatcccacactggagcttgctatagaggaggagggagggcccctctcctggtgaaaacaagcccagacctgaccctgcagctctgggagaagagccacagccctgggattcccaggggtttccatttggtaatcaggactgaacacagagaactcactatggggtgtgaattaagctgaatttttcttgttggtattttaaaaggtaactcatagggaactagagtgagtgagagtgagtggatatgagtgagagaaacagtggatatgtttgccagtttctgaccaggatttgtttgtattttcaggtgttcagtgtgaggtggagctgatagagcccacagaggacctgagacaacctgggaagttcctgagactctcctgtgtagcctctagattcgccttcagtagcttctgaatgagcccagttcaccagtctgcaggcaaggggctggagtgagtaatagatataaaagatgatggaagtcagatacaccatgcagactctgtgaagggcagattctccatctccaaagacaatgctaagaactctctgtatctgcaaatgaacagtcagagaactgaggacatggctgtgtatggctgtacataaggttccaagtgaggaaacatcggtgtgagtccagacacaaaatttcctgcaaaaagaagaaaggagtctgggccaaaggggacactcagcactcacaaaacaggtgcagccccaaggcaggtgcagatggagggagggtaagggctgctttccttcaggatctgtggtttcctctgcttctaatatttcccctctgagcctctgtacatttatattttgtgcccaccatgaggtcgctggattagaaaactaatttgaaagaggaaatattctcatatgtcctaaaaacagatgtaagtattggaggcataaaaatgcataggagccgggtgtgtctgtagacactgccacccccaatgccagacccacaactagtgctggagaagggtgggagtttgatggagcttccctgatgaccccgtggtccaagctaagtccagcaaggccattggtgcctcgctgagcacagttgtccatcagggatctcccatgtgtcccagcagcagccatgcctcaatctctccactgtgcacagccattgtctgggaggagctcccaggatgggtgtctttggcacacacagttgatgggtgttagagtgcagtgcagcagctggctgcctggtctattgggctcctggatattggagggatttgaggtgcattctcagggccagcacgctttgtcaatttttatatgaaaaccatgtgatttaattcattttctcagatgacatagataattaataacacaatctgcaaacaattataattttcaactttaccccaagttcattgtttctgaattctgtgcaggatccagacatggtactgcccttctcatgagaaactgttcgatctaaactgaaaccagttgtttctcgtatactttggttctccccacatgcagagatcttgattagagcaagtttggtactttccacgcactcaccctcacctccccagataaagagcagaagttctccttagactgagtctgagggaggagctgttcctgtaccactcagggcctgcggagacccccaggtgcagcttcactgagtcaggtgtttcactccctgtgattgctgctcaggtctaattgtggctcggaattaggacagtcttcaggttatcacaggtcaatcatattctaaaaatcatcgttatcacacaccatggtaacaattcaaggttcatttttctaacggcagtttctcttttttatttggttgcaagtttgaggaaaggaacatgtgataatactttttaacctaacctcgaaatctactgaattgttctaggagactcacaaattggacaaagtgagctctttattctcataaaaatgtgtggttttgggaatttcactgtgttgcccagaacctgttaacatcaacaactatgtttctcagcacacttctggcttgagacgtccttgcagaccctctccctcacctgcactgtctctggattccccatcataaccagtgtgtcctgctagaattgtatctgcttgcccctagaagatggacaggagtggatcaggtgcatgggttgtgaagggagcacaaattacaacccactgctcaagagtccatatccagatccaagaaacagttcttacagctgagctctgtgcccagtgaacacacaactacgcatttttaagcaaaagacgcaatgaagggccttcattgtgagcctagacacaaccctccctgcaggggtgaataggagcagcagggggcattcggggcagtatgggggcttaggatgattgttaggggtcaggatgagcaggatcaaggcttcgcatcagggcaagtgcaacagggcagaaaaggggctgtagatgtgggttgttctcaccatcatatttcaccaccagacaccctccactacatctcttctaatgtgtctgagtgttgatatgattagaaaatggcatttatgtaaatactaatatgtacccatatggaggtgcatccagttgtcttctccatcttatgtggaccttgtccatcaagcactaagtccctgtatttacttgagtacctcacacattatggtcaaaacaggtagggtctccttttggcatggtctctcctcctgccttctctcttctgtcacacaaaaacacgtgaactgacacacacacagagcttcccaactttaattatgtgatgtattgaagcaaattgattagtgtgcagcttttctgctttgcctgctattcatgttatgtaaaaataagaaccatgtttttctcagcttgtcacttctctaagctaagtagcatctttgtttattatacccagagaccaaaagcgatccaactgttattcagcagcttaactggtaaacaaattgtggaaaattcacttactggaatcatacccactgctacaatcaagtaatgctggatacacccaacaccatgcttaaaatagcaagtacttgaataagtaaaataagtcagacaaataaaagtgcatacatacgattccacttctataatttctataaagtaaaaatgaacttaaagttacataaaaagatctgtagttgactggggacatggtacaagaagagaaggtatagaaaggagaaactacaggagaacaaaaggaaatttctaggataattgatttttttctctgttagtaaaagtgaggattatgtcaatatttgtaaaattgtacactttatgtaaagattcttatttgctaatttcacctcattaaaatattgcaattttttaaatgtctagtttggtagaaaaggtagtagagagagatgaataaaatacataaaaatcagagagtcctgaatacacacatgaatggaccctgggtctcactgtacttttagggagacactagaatacaaaaacataatgacaggatttcagtacatgaaaggagcttctcagaccccaggaggcatgtccaactgcgtctgggagttaactcagggagcaggcatgtcctttggaaggagccgtgacaccaagctcccagcatccattgtagccgacaccatgccaatgccaagagatctcaactaaaattttctgtggatgttgagtctgattatgccacacactcacaccaagtgagtatggaaaggatagttacctgcatccttaaggtgtctgctgagagcagggcaggtctctcattaaggtccaaagtggcttgatagggcagggaaggagactggctcagggttgttatcatggtttggtggggagcggggcagagcatcctacttgcaggaagggttttgtggggtttcaaggccaaattggcatcaaatgagggagctcctgtgatttctaactagatttaccttgtatgcttaaaaaaagagatgatggaggaatgagcctgaagttatcagcagtcaggcctaaacacagagtctgatgacttactctaaatagcaagtatacaaatgatgagtaagaaaagagacaagactccaatatgggtggacaacagccaggtctgcagaaaatgagaagactgtttataagcaaagaataatgagtaggatatggaggaggattctggtccaatgtcttgtgtggaagcttctcatgatttgagatcatcagcttattctgaaggtcttaggtcacctgtcttcttcaaaatatcagaagtgcctgatgatatgtgaggatgcgcagtttaacttcctctatttgagtagctttacaattgtgtaaaattcttaattaattaatttttttttgagacggagtctcactctcttgtgcaggttggactgcagtggtgtgatcataacatagctcacggtgattttaaattcctggctcatagaatcctcccacctcaacctcctgactagcaagtagctaggtttccagggcccttcatctacacttggccggttctttacattctttttttttttttttttaggtggagtttccctcttcttgcccagaccggagtgcaatggcgccatctcagctcactgcaatctccccctcccaggttcaggtgattctcctacctcagcctccagagtagctgggatcacaggcatgtgacaccatgccccgctaattttgtatttttagtagagatgacgtttctccatgttggtcaggctggtctcaaactccctacctcaggtgatccttccacctcagcctcccaaagtgctggaattacaggcgtgaggcaccacacctggcctcttcgtttttattcatatattccttcagcagccactatgtcttcccactgatttcttcagtttctgccttttccttttgaataaggctgttactcctgagggaagatgggaggtgggcctggacagggacttggtgcattcctctctcccctcccagttcttattggtttctccagtgtctgtagaacagtggttttgatggctttacctctgcagataatttctcttgcaatgtagtgctgatggggaggtgtgtctggatgcacttcacctatagttgctgttttgctttcccagacagcaccatcccaaggggtagagggtggagcattttgtgatgtatccccagtactgaagaaaaagccttcaatagcaggaggaattcctcaactgcatacactctgagaatttaaacaataacttctctatcacactcaaattgaaaccacccaatgaatatgtctactttaatcgtgtgctaacttaaatgacatttggcagcctctgtcccagaaaagattatcatctgctcctgtttatttccctgcaagtctttatgtctgttcagatttcagatatattgtttgtcctataacatcaaaaatttgatgtatatatgctaatttgcagatcagtaagtttagtatttgttataagaatagtaacatatttttatggggtgcttacatctccaagctgagaagcacctctgtgtaatactaagcaactagaaatggtacaaatatcaagaagatacatagataaacagtaatggcatgctaatttatggtaataacatccatcattagaatcaatacattgttgatgctcaacatgtgtgcatcataagtagttatgtgcgagaagccacacaaataaaacacatactatgtaattcctgtataataaattcttgaaactcaaaactaaggtattaaatgtgaaggactgactcagaatatggtggaggaagaaaataattgggaaggaggaattgtagaggaacacaaggaaacttttaagtgtaatttgtttattcattatttggatggcttttggggatgcacaggtgagcacgagtggaataacattttgttttgtttgtttgtttgtttttttctgaagagatgtggtcctactctgcgacccaggctggagtgtagtggtgggatcatagttcaatgtagcctccaacttctggtctccaacaatactcctgcatctgccatctaagtagctggaactaccgttgtttgccagcaggcttggcttgagtacttattaaaccgcacactttttgcaatatttaatgtatagtaataatgtctcaataagactattacaaatcaatgaatgaataatttgttctgtacagatttatggaaaaatagacactaacatgatgaatgactgacatttatgaaaatacagctgcatgaaatgtgcttctctttacattcattaggtaaacacaatagtgcatacacatcacaccgtgctttcattacaggaagaaagatctgaaaatgtcactggggtgaaccatattgtgctgggcttggttcaggaagcagtcaggcccagtgttgtgaccttcaaccacagaatcctaaaaaataataaaagaggctcccccaaagtccccatcagttcctggactcgccatgtgtctgggccgtatcagtgcatccggagctccctggtggctttagggattccttgcttgccatgctgaggtctcgctatagattatgttgggttttctgaggccgttttgctatttaagacccactccctggcacagagcgattccctctaaacctgatagaggttctgaactacaaataacgttaagtgaatcctggtgtgtctgaactcacatgattgttacattaagctgctgttgcaatctgtttcctcacctgggaaaagaggagccaggacatagtgagttgaggccccaggaagataactgaattctcagagggcacaaccagcatcctccttccagggagagcctaaaagactggggcctccctcatcccttttcacctctccatacagaggcaccacccacatgcaaatctcacttaggcacccaagggaaaccatcacacatttccttaaattcagggtcctgctcacatgggaaatactttctgagagtcctggacctcctgtgcaagaacatgaaacacctgtggttcttcctcctgctggtggcagctcccagatgtgagtgtctcaaggctgcagacatggagatatgggaggtgcctctgagcccagggctcactgtgggtctctctgttcacaggggtcctgtcccaggtacagctgcaggagtcgggcccaggactggtgaagccttcggacaccctgtccctcacctgcgctgtctctggttactccatcagcagtagtaactggtggggctggatccggcagcccccagggaagggactggagtggattgggtacatctattatagtgggagcacctactacaacccgtccctcaagagtcgagtcaccatgtcagtagacacgtccaagaaccagttctccctgaagctgagctctgtgaccgccgtggacacggccgtgtattactgtgcgagaaacacagtgaggggaggtgagtgtgagcccagacacaaacctccctgcagggaggcggaggagccggcgcaggtgctgctcaggacgagcagggggcgcgcggggcccacagagcaggaggccgggtcaggagcaggtgcagggagggcggggcttcctcatcagctcagtgctctccctcctccccagcacctcagctgtccccaggactcctctttctttattatctgtggttctacttcctcacatccttgctgcaggttttaacagtcactggcacccttttttcaacaaattcccacaaggcccattttaccttcttgacaagcaaaatattctaaggcttctcactatcccttgattggcgtcatctactgcatcgtgtctttctcttaaattcatgtgatgaaaccccaatcccagtggctctgtattggacagagggattttaagagggcaaataagttaactgtggccataaatgtgggaccctaatccagtaggactcttgtccttatgagaagtggaagacatcagaggcctctctctccacatgcacacagaggagagtccatgtggggatgcgctgcatgagaaggtggccctttgcaagcctggaagaggcctctcaaaaaacttaccctttctgcacccagatcttggacgtcaagactccagaacaataagaaaattaatatttgttatttgaaatagcctagtctgtggtatcttctcatggaaagccaagtagattcagagattcaattgtgttagctccgtctcctgcatggagtagcagcccaccgaggctggacacatctctcaaattattttcataaagaaaaatagatccaagatgaaaaccccaccacatttctgctgagccattcacttagcagcagtctctgagatcagccctgggggtatgttctaggtcgtgtatctcactttccactatgagaatccatgtagataatgagaaccagccagatggagtcctgatccctgcccaccttctgcttccccccaagtgacacacggtcacagaaaaccactccagcatcaccctgtgtcttgtactctctaaaatcccactaaagctgaccctaaactaggagctatttggggctggactcattctgttcttagtcttccataaggtccaggtgccgagtagagcctcagtaaagagtgagcttcaattcccctaacccacatcattcccttacatccttgtcatgcacctgtcctctgcaggcacccagggcaggttacacaggaattgcctgaagctggtctcaggtgccctgctgagaccactggttatgcacacgtatgatttcaggtcatgcaggctcttctgcaggacagacctgtgtcctgtagagcacagacacttggtgacccagggcctcctctaataactcatacatctcatgtcagtgtatatccaggtggcccctcagtgcagcacactagggtgattaccctcacaggtggctttttcaggcggtgaacagaaaatggggtgggcacgctggtcattcccatcatcggtgatatccaagtgaattttaaataaatgaaacaaaactaacaacaaaggggaaggatatgtacctgtatctgggaggtagactgggtcccagaactgtactgggagtgggtgtgaaaggcccttttgtgtgggaagccctccagcatgagtgaaagctgaaggaatgatcactgtaggtggaggctgatggagaagctggcagggtacatttcctgaagctgttcccgggtgcgtgatggttcaatggcccatgtacatgaagaggagggctggactcatgtaggatcaaggaaactaccccatggcaatggaagaaaagaaaatggagatggacacccctggaggcagcttattagctttggtggaggaacgatgggaatttattccaatgaccccagcattttcagctaaatatgagttgcattaacagacagaattatgaagggaagggagaaggagtttatagagggaaaaagcagaacagaaaaaaagaactatgcaagtctatcaaatggcagatgacagagtggagctgatgcagctacttcattcttcccggaacctaccagagaccttggcattcctgtaaggcaggtctagtggtgatgcacttgtccactttttgctttttggagaaacgtttgaaacatcctacattactgaagaaaagctttaattagtgtaatatttttacttgacagttttattggttttgttttattttcagcaacttgaatagaatcatgcacatcatgatatttgggtgaacaacaggccacatacacgataatgatctcattaaattataatactgtattttcactgcatttcttccatacttagatatgttcatatatatacatacctaccatggtgattcaactgcccacagtattcactacacttacatgatgtacagatttgttatctaggagcactatgctatcccacacagcctgggtgtagcagggtatttcacgtaggttcacgtaaacacactctatgatcctcgcatgatgacaaattgcctaaggacacattgctcagatgtatccctactgttaagctacacatcattgtatctcatctctctccatttttggtctctgataaaattctcgtgttgtttttgcattcttctctgagctcattgaacacatttataaggtttcctttgaattttctgccaggtaatcaatatacctccttttaatttgtgtcagtttctagtgctttgctttgttacagaatttggactgctttttttctctttcattattattatcactttgtacattctctgttgctttctgctcattagaaggaaaagccatggtaaccactcttcacagaatatgctcagggcaaatgccatcacctgttagcccagtccatgatagtggtgtctcttaaaatttcatactggtccaaactttttgttgttgttgttagtggcactcagacctatagaggattttaagttttcccctactctaaattaggtggcatcaaaattcatcctgcaggcagtctctgataaagtggagaaattggacaaagttttagcatgtatatggttcataaaaataatatgagtttaaggttttctcagccagttgctacatattgatattttataatcatttctttgaatgtctctggagtttatcttttgaaaatttagatcagaatatataccaggtttgaggcttcttgtctggcttaacgatctcctataggtcagcgtgtgaaaaggcacagagtctatctgaagaggagaactcagggaagccccaaaacaacagaggagacaaaactgaggactttgaggaatctaaagcttctgggacctgcagcctccagacatgctcagcaccctcttgttatccacggactaatttctttctcttttctgagtggtattttctagggttcccgtcctccactttgacactttggtatgtccatgtgtgtccattgtgtttcagccagggacacagaaccaggaaaacatcatggcttttctagagggagctgacctgggtaatcaacagttggagtagaaagtgcctttgtccatgtgtcacaggcctaagggccatgggcaggaggtcaggaagagaggatgaccagacggctggggaaaccaggatgaacaaagccactctccttcctggtgagaaggggcatgtggaagcctggtgtccctgtagggctgaaccacactcacctgcccactgctacctgccaacgaggtgacccacagagcagcagcagctcctgagtcactcacagaggctgcctcctcctccaaaccctccagtgtatgtgcttccataagtgtgagccccagcagatcccaaagttttcaatgggttcatctagctagtgtctgtcctcagccccatccccaggctcctgccctggttggtgtccacagtgtcccagcagcggtgacagtgacagccagggcctgcactttccagagcagcaagtttggaagaatcaagtcccagaaccagcctggatttggggcaaacacacaaatttcactctgaggggaagtgctggaaagtagccttgagtcttcctcagctcacctgtggctgatcctctgcatcccatcagcgatacatgagccctccccaaccccagcgtggagctgtttcaatcgcagcaggatgggaatgtgtcttctttctggggactttttaagcacagctcttatgttcctgagatttgaggtttataaaggtgtgtcagtcacccacagagtggacctgcacaagtaagacaaggacaggatccccaggagaggcacctcatatgagacgggacaggcaggtcccatcacagacactggtcctcagaaaccctgaccagctactcaccttcccaggtcacctgtgtctgatcagttcctgtgtttgctcctgaaaagatccccatcaagggtccccaggtcctgcccccttccttgatgtgcctctgggagtggggctggctgggctgtgggtctgctgtgactttccccacaggtcagcggctcagtgcaggctgcgccaactcggtggggctgggctgtggccgaccctcccagggggagcctggatgcttctcgggggcatctgcaggatcccaggttctgggagaacagggaagccacagtgtgtgcagggccccatctccaggtgtaaagtgtttgctgtcactctgttgacaagggcatatccccaggcctaggggcactgtgggtgcacaaccaatgtggtagacacagagagtaaggcacatttccctcccattactgtggggaatctaggcactgtgtgtgtgtgtgtgtgtgtgtgtgtgtgtgtgtgtgtgtattaggagttttgcagtgggctctgagccccgtgattttgtaggtttagaaattatctgatgagatgttcatccacaggaaccgacaagagattaggtgttctcccaaagcccctgggagctcctggactcattgtgagtgtggactgatccattgcttccggagctccacagaaggggctccctggtggtttcatagaatccttgcttggggtctttctgcagagttcactggctttcctacggccagtttagtattgtaagagatggtgtcagcagcacatggtatcacatgtcactaaatgagcattctgagccaggacacagcatcttcatactggggggagggaaatgctttgggagcccagacaggagcctctctgcagtgcaagggctgggctgcagggggcgctcaaggcccacccatcacaggctccacccccagagcaggtgcaccggaggctggggagggattcctctcaagatctgtgtcattcttctaaaaaaaatctaaaatgagtatttgacaaagactgctgaacattctataaatatcctattcaattgtgagcatttatcaaatttgatgttgtaatgagaaccacttttatactagatatttctaaccctgctagatatcttaatagtatgcagctggaggttaagcaagcttttcttttatataaataagtgcaactttggagaaacacactcatcccccgaataagacattcatgtattaaagcctagaaatactttaaattacctctgagccattcaagtgtgtgttcacagtgaagtcctgttctagggaaaattgttctccagggggagaagctttgtcaacatagagcttagggatgtatcaggaggcacatgacctctaaggggattatagcttgaacccttagcatcctcctgttggtaatacatgtgtcactctccaatctttctcatgcagtatcaggtatgaaataggatcgctcatgaatatgcaaataactgaggtaaatatagatatctttgtgccttgagagcatcatccaacaaccacaactctcctcagaagaagcccctagaccacagcacctcaacatgtactggacctggaggatcctcttcttggtggcagcagcaacaggtaagggacctcccagtcaccgggctgagagagaaaccaggccagtcaagtgagacttcacgcactcctgtctcctctccacaggtgtccactcacaggtgcagctggtgcagtctgggcctgaggtgaagaagcctggagcctcattgaaggtttcctgcaaggcttctggatacaccttcacaagctatgctatcagctgggtatgacaggcccatggacaagggcttgaggaaatgggatggatcaacaccaacactgggaacctaacgtatgcccagggcttcacaggacggtttgtcttctccatggacacctccgtcagcatggcatatcttcatatcagcagcctaaaggctgaggacacgtgcaagaggcacagtgtggaaacccacatcctgagagaaccagaaatcctgagggaggaggcagctgtgctgagctgaggcagtgacagggacaacgtggctgcaccctttgttgacatagggttatacacatacatatatatgcacccaacactggagcacccaggtatatcaagcaaatacaattagagataaacagagagatagacccaataccataatagctggagactttaacaccccactttcagcattggacagatcttccagacagaaaattaacaatgaaatcttagactaaatctgcatgacagaccaagtggacataatggatattgatggaacacttcatccaatggctgcagagtacacaatcttttcctaagcatatggatcattctcagggatagaccacatagtagaccagaaaatttgtcatttttaattaaaaagatatcatgtaccttctctgatagtaatgaaagaaaactaaaataataagaggaattttgaaaacacatggaaattaaacagtatcctccttaattaaacaatgtgcttccaaactgaactatatgctctaaaatgggttaataaagaaacaaacaagaaaattttacaatttattgaaagaaatgataatgaaaacacagcatatgaacacctatgaaatacagtgaacatagtactaagaggaaagttcacagctataagcacctatgttaaaaaagtagacaattataacataaacatcttaggaatatctctcaaaaaaaactagaaaagcaagagcaaatcaaatccaaacatagtaaaataaaaaagttaagatcagaacgttaataaataaaattgaaataaataaaacaataccaaagatcgatcaaatgaaaagttgttttttaaaaagataaaagacatctataaacctttaaccagaccaagaaaaaaaacaaagaagaccaaagtaaataaaatcagaaagaaaactggaaatattacaaccaatagtgcagaaaatcaaaggatcattagaggctactaggagcaactaaatgccaataaatcgaaatatctggaagaaaaggataaatttagagacacatacaacctaccaagattgagccaggaagaaattgaacagatcagtaacaagtagtgagagtgaagccataataaaaggtctcccagcaaagaaaaaacccgggacttgatgacttcatcactcaattatgacaaacatttaaagaagagataatacctaatctcactcaaaatattccaaaaatagataaaaagtagataaggaagggaagaattcttccaaacttactgtacaaggccaatgttacccttatatgaaaaccagataaagccataccaaaaaaaaaagaaaactacagttcaatatcactaatgaatatggatgcaaaactcctcaaggaattcttagcaaaccaaattcaataacatatcaaaagagcattcatcatgaccaagtgtggcttatcccagagatgcaaggatggttcaacctatgcaaatcaatcaatgtgacacatcgtatcaacagaatgaagggcagaagacgtaagatcaggccttaccttgttctcctcactcaaagtctaccattagttctttggtcctcttgaccagtcctgctgtacttggtctcccgtgattctgttcccaggtcctgaaacactgggcttctgcacacctggagtctctctctttgaacatggagaccctgtatcctcagagagggatgatgcctcattgtggctcccatgccccatgcaaacaattcttccaacacagtcatgatttttcctgttggaaattgaaaggggatgtgggaattgatgtgtgtgtgtgtgtgtgtgtgtcctcaggcctgttgggcctgttgagaacacagcagggctctatgtacaacaggaaagcaatgttttctctataccatctattttcttataaagtgttcataggtaatcaaaaggaaatgaatcacagtttataagatgttgtggactggactgatgttgtcactcaaggctactatgggggctccaggaaaagaaacctagaaaaggataagactgtgagcaaagaagcaaaacctgggaagcagcagggagagggtgagcaggggtgactcaactggggagggataacaccacttaccacagagggtgaaaactccgtgctcagcaaagaggagaacttactcagcatttcccctaatcctccctccagaagcgcgactgccaggaaagttcacaatgtatcatctccagctgggaacccaaaagaaacaggagattttagggcgtaggtcctgggcacaaggtgtttccctggttcctaccccttccctctctgtccagcaaaactgcttgtttctatcacttgccttcctgtccttggggtaagaatggatgctttgacactcagcagagggatgctctttcagaggaggaatgagtttgtgttatctgatgtctgagcaggacactcacctctgggaagaggctccaagacagaaggtcgccgtggttcctgccccttatatgtgaggggctcttgacacatgcacacttttcctcaaactctgtttataccccagcaacaatgctgggtgttgtcagcctctctcctccccagatactgctctatcatcagcttgagcacagtttccccatgaaaggcattattctctctctcaagaagatcaactttttacatgtcttcgatggatgacagtttttctgtgtgagaatctagaaataagaaatggggtaatggggacaagtgagctctctgtgtgactcactaggaagtccactgttattccaggtgtcctgtcccaggtgcagctgcaggagtcaggtccaggacccatgaggccctcagacactgccctctgcctgtgctgtgtctggattcttttttttaccatggatattatttgagatgaatccaccatcccgtgggcaacaggctggaatggctggggcacagttactagactggatcatcaaggaatacacatcatgcaccctccacccaggtccatgtccccatcaacagtgactcaaccaagagccagttctctgtgaagctcagctccatgaccacctaggacacggctgagtattactgtgaaagactcagtgaggaggtgtccttatgagccctgacacaaacctgtcagggcacttaggacctccaggaagactcaagaccaccaaggggactcacgaccactggggaagggcaggttgcagtaagcacagggccagccccagagcaggtgcaggtggagatgagaggctggtttactgccagggtctggggctgcttctccatttagatgtttccttcagagaccctcccttatttcatgatgctctgcttagctgtaagtctctgaaatatcacagttttgttgtaccaggaggaaaccttctctcaggtgctaaatgtagaacaatctctctgccagtggttgccagggtcacagccctgtggaagctgaagggtacccagtgagtcttctccagtcacattcaggacaggaaccttagtggggttccctgaggagaacagtctttaggaattctaacctcagccaagagaggctgggccagggtcagtgtcaggtagaacctcacaggatttacgtctgacccttctcctgacactaaagcatgcaaatcagtatcagcactgatctggggccccttttgctcctagcccattctatttcttgttagttgtatttgttgttgattttccttttgctgttcctgatccctgtaaagtggagatgtggttcctgctgtaaaaattccagggctcaagccctttccctgcagctcaggtggggctcagactgtggctcctgcaaccacgtgggagaggctgatgggactatcttctctcccgttgctcagaaccctccagtgtgttgtgtggagactcacctgggaatgcaagtggccaatagttgtgaaaggtatgagcttgtttggtcaaagtggaatgtggatgtggaatttatcctgtgttgtgcaaactaacacaggttcaccttcctcacctgtagtgttagaaagagtgtgaaagttgtaagaatcaaaacagagccacttgtgttaacaccctgacaaatggacctaggaatgaacatgaaggagggttcttaggcccatattcctgataacaaaaactatcataaatagactctgcttagccaccatcttggatagaagcccaccacaaccttattaaaaattacacttgcaagaacatcagctcagaaactggctgttcaaccttacactgatgccaccattgctattgattctacaactatatgataattatctcaaaacaacttttgtaacccacctcattttcacttcataaacctgtggattgacatgttggagttactgctgcatttgtagataatgataaataataaggccttttaacaatgtttgaagctgctattctctgatgtctcttccaaaataaagaatttccaagtggatgacaatgaaaaaattgttagaaatatttggtggtaaggcatctttaacatcctgttgaatgtttctgcatagcacatcaatcccttaaaatactttgctatatctgcatttaatgaatgagtctaatattgaggtgcaattgaaaatacctgggcctttgatgaatcagctcatagggtgataatgtctgggtccttgagaaagcagaccctgtgttgtaagttttagtagaagtaccttttgcaaagaaagttcatgtgtttctgaacattatgctacttttaacttaagaatgcaatatatgatttatttttacttcaaactgggtatatacccagtaatgggatcgctgggtcaaatggtatttctagttgtagctccttgaggaatcaccacaatgtcttccacaatggttgaactaattttcactcccaccaacagtataaaaatgttcctatttctccacatcctctctagcagctgttgtttcctgacttgttaatgatcaccattctaactggaatgagatggtatctcatcgtggttttgatttgcatttctctaatgactagtgatgctgaacattttttcatttgtctgttggctgcataaatatcttgttttgagaagtgtctgttcatatcctttgcccactttctgatggggctgtttgttttttccttgtaaatttgtttaagttctttgtagattctggatattagccctttgtcagatgggtagaatgcaaaaattttctccgattctgtaggttgactgttcactctgctgatagtttcttttgctgtgcagaagctccttagtttacttagatcccatttgtctattttagattttgttgtgattcatacttggttaatttttaattgcattgttttcttctgattagttgtaagtatacctgcatattgatcaaaaaagccgtttaacaaatcaaaaggaaacatttaacaaatacgtgacttggaagtattttctccaagtctgttgttgtcttttactcccttgtcagtgtgtattgcagaaaaatatgtatgtgtgtgtgtgtgtgtttacaaattaaagaaacaggtataatttcatttatccatagatcacgtctttggcattacatctgaaatctcatcataaaatatactaatagtgatttttttttccatgtctctaatctcaggccacaatctactcatgagtgtttaaacatcacctacttgattagaggactatcaccctaagatatttggaatatttctggaaggagatgtgttctttttcccattatttctctatttagtcatttattaatatccgcattggtttatgaatgtctatttcatactctgaagtaaatccatgctatattattcattttattgttcaaatcaccacagctttattatgtgcttggaactcatttagtttggatgctgcatccttacagcacacctcatcattttgtttttgaacactttcctgtttcctggtattacaatacattctaagcccattttctatattaactttttcatacatagaatcagacatttttctaaagattgcttctttctgatgttaaaatatagtattaaaataaaatttgtgatactgggtatatgtgttgttaatgtggtataagtacttttaggacctctcaaccaactggcctagtaaatgtgcatgtttatatgaactcatgtttaaggacacattgaaactatttatgtatcttatattctgtaactttattacattaaaaatgagaatacactggtctcctcacccaactatgttaccaccatatcgacctttctaggcttccttgactgtccataatcacccactgcaaagtgaggaaccccatcccatcatatgccattgtattacttagctgcacaatttcaggacacatgcattgcagcatcagaaatgtaaagctgtacccttcttggaaccatttttatctactagaatagagtgcttatgtgcagtttctttacactttaaacttatagaatttcctcattttcaaagttccttagatcagcaacttcgttttccactttcttcatgaagtcatttcaattacactgtataatttctttatttgaattctgtaaaagccaaaactacagtcaagtaaacatagagaggatattccaggaatttacagagtgggtatcaaataagttaaaaaggcaatgtttaagaagagtaaaactatttttagtgatatgcaatggttgagacatgacacaattaatttgtctaagctcataattttgtgatgaaaaatataaacctaaatatatacaatttaaaatgatgtttagcagtacattatccctaggatcaaatgcagactgtataaaattatctaataacttatttggtgaggatgccatgagacacatgcaacaaagaatgaactaattttccttatttgcatataagatgttgacattcactaaagatctttaatttaaaaaaaaatcaattttctatgtgacccaggttttttcttccagacaagcaaataacccacaggattattttctttccttgattgagaaagattttccccaaacttcagctcagttcaggcatatactgtccctaaatgggcatttaccctcagatgagtccacacacctgtcaacacgtggagtcttctgtcagacaaacacacctttactgatgtggattcttccctcagacaaaaacacatgtccccacatggacactttcctcagactaccatgtatgtccttacatttacgctttcctcagaaaacagacttttcctcatgtggactcttgtctcagacaagcaaatatgtctccatgtgaactcttcactcagataagtacacatatgtccacatttactgtttccttacacaggcacatatattcaatgttgaattgttttgtggcaaaatgatctcaagataatggtaattataaatcccctccctaataaagtgtagatctgtattttttttgttgtaacctaactttgccttattgtcaaaaacagtaatttgcagctctaaatgcaccagttagagacaggtgtccattttctctggaaatgtatttttattttcttactggacatatttgttgataatgttgctactatgaagatacctgaacagtatccacattaaagaataaaaaagagtaatgggcagaataaccctgtgcatccagacccagaaatcctttgaccctgccctcccgaaatgtagacacagaggatggatgagcagtgctgagcagtgtacccatgaccacaaacatgaagacatggaaatgtgtccccactcctcctcatgaaaggcagctcatgccctcttccttcaggccctggtatggagccaccccatgtctctgcccttccttagtgtccacaccatggggtctgcactgatctggattcccttctcatccccctcaatattagtgtgccttgtgaatcaggtccagctgtggctgttctcagtctgtttcctctgtattcacagaagtcctgtgtgatgtttactgatggagtcagaaggagaaaaatttaacagcccagcagttcactgagactgtcctgcaaagcctctggtttcgggtttactgggtgcagcatgagcttggtccagcacacttcacaacaggaattggtgtgggtagcaacagtgagagatcatatgggagttctaagggttactctccatgagtacagataaatcaacattcccaagtgacaccctttcaagtgcagtctaccttacaaggaccaacctgaaagccaagggcaaggccgtatattacagtgagggacacaggggagggaagatctgtctgagcccagacacaaaaatctctgcagagagacaggagggaactgcgtggtagatgctgctcagaaccaccatggggtggccaggaaacaaggggtgcttaggacctctagggagcgctcaggacgccaggggggtgctcagaaccactaggggacgctcaggacactaggtggcgctcaagacaacactactgcactcatgtcaccacggggtactcagaaccaccagggggcgctcagaaccaccagggggcgctcagaaccaccaggtggcgctcagcaccaccagggggcgctcaggacaccagggggcgctcagaaacactcggggacgctcaggacaagagggggtactcagaaccaacagggggcgctcaggaccaccaatgggtgctcagaaccacaagggggcgctcaggacataggtggtgctaaagacaacaattctgggctcaggtcaccagggggcgctcagaaccaccaggggacgctcaggacatgcaggttctcttaggaggcagctgcacatcaggagcttcagaggctgtgatttcctttcagaccctggaaattcctgacctggtcaagcaaaagtcttccccaggatgtctgatttttccttttaattccatgatttcttttacctacaaaacactaacttagaacagggatgtaatgcaacttttattgctgcgtattttctgagtaatactagcaatgatctctcgggacaattattaaaataggttatttatatattttaattattaaaaataatactattattaaaatagtaaaattttttaaatcacacttgtaatcccagcacttggggagactgaggcagacagattacttgagctcaggagttttagaacagcctggcaacatggtgagatgctttctatacataaaagaagaaatagctgagattggtgcaaccagctacttaaaaggctgaggagggaggattccttaagcctgggaggttgaggctgcagtgagctatgattgtgcctccacacaccagccttggtgacagagtgagaccctgtcttagaaaaaaaaatgcatatcctcaatacagactatttccatgaatagagttttgtgtttttgtgctgtaatagtcaaacaattgtatatgttttctaactttaactcagcatatgcatggtgttttgtttctttttctttcatctgctgtttgtggaaaataaacagcactttaaaggctctgtttctccactttgtttggcttccagtgtcctgtttttcagactgtttctccaccttcccttcttctttgaaagccatttatcttcctcagtctccatgcagaaaaagaaagtccctttactttctgtcttccaagtctggtgaatcagttcccttcttttcataatcactgaagccaaccaagtttagaagtataacagttctccttagaatacgctcatctacctgcactctctgccctcctcatccttttctaggtccctccagacatcaccctcatcccataccctcccttccttaagtaccacagagtgggctcttcacctcctgctgccctctatgtgctcagccctggggctcactagtcctttgattatgaagtccaaatccctatgtgcttgcacactctcacgccaccctctaggaagctgccattgtgagagagtcctgaaaagcatgggctgggtttagtttcataatgcatactatggtcaattagttattctatttgaacattctatttaattaatagatagagttaattaaatagagttattctatttaattctattaaactattaataaattagttattcaatttattaataacaggccaatatttaaaataaataccattgcacgtttaagtgacatatttgacaataattgcatttacatacagttttaccaaaacatgtatcgaagtgtatttgtttttttaaatattggaataggcagacatacacataggaaaacattattttgtactacaatctcaaactgcaaacacaatttaaatgccattaaataattagaataatatgaaacaaatgggcatggtgttttggtgtttaaatatacattcatttcacctgatcatacttatgtgtctttgctgggctgctgtgcatgtatgtgtatttgtatgaccatgaagctttcagatacatcattaaattacataaagtgttaccatgcacttccctcttttaggggacaaagtaaatctttcagggcaatcgcagggaaaatgtgtggttggatcttccacacagagtccctaccatgacattgccaagtagagctatggaagggggctaccaacctccagaccccagaatggtagatccacaggcagcttgcagctcgagtctggaaaagccacaggcacccagctccaacccatgagagcagccttatgggctgcattagggaagtcacaaaggtagggctgcccaaggccttgggcacccacccttgcaccaggtcacaagacatggagtcaatgattattttagagccttaagattgaaggactgtccgactaggttttggccttccataaaaatctttacccaatttttgggccattttctctttttagcataggactcctcacccaatttctgacccatcattgtactttggatgtaaataacttatttttgatttttcagtctcataggtgaaaggaacttttccttgagtctgaactttggattttgaattaatgccaaaacaagttcagattgtcagggaccactggggagggattattgtatattgcaatgtaagaaagacataaggggcagaatgatgtggtctggatgtgtgttttctccaaatcttatgttgaactgtgaaccccagtgttggaggtgaagtctgctgggaggcatggcattaggggcatatccctcatgagttacttcgtgtcatccccttggtgatgaatgagttatcagttcacatgacagctgattgaaagagcctggtaccactcccttctcttatcttcccccctattgtcatgtgacactcttgctccccttcatcttctgccttgactgtaagctttctgaggcactcagcagaaacagatgtcagcaccacacttgctgtacagcctgcacaactgtgagccatataaaacctatgtcctttataaattatccagcctcaggtatttctttacaattcaataatggacgaacagaagaagtatttaattgtgcagcaaattaggggtgtggaatcattaaaatggacttaacgcctgtagaggtaaagacacaagagtctctctctctctctctctctctctctctctccttgaacccttctctgtctttacatacacacacacacacacacacacacacacacacgctccacgtgaagatgtcatgtgaccaaatagcaatatggtggctgctatgagccaacagtagaagcctcaaaataaaacctatcttgccagcatgtttatctttgaatttccagaattgaggaactgagataaaattaaggttgtgtaagttaccaagtatgattgtttttaatgtttgaactgactaaagagaatttgggatgaagaagtggggttctgatgttacaattatttcaacactgtggaaagtgccttggaattgggttatgtgtaaaaggctggatagttttgacatgcataaagaaatttatatattaagtgtcattctgatagattaaaatgagtagagtgctattggaaactggataaatggtgatctttgttataaagtgacaaaaaaaacttgtctagactatgttgtgatatttagtaaaagagaactttgagcagcaaaattgaatatttagctgagaacacttctaagtaaaatgttgaaagtgtagtttggtttctcctgggcatttataataagaaatagatgaattgaaaatgaaattataagggagaaaatatccaaaacttaaaggcttggaaaattctcaatctatctgtgttgcaaaaatcagaaagtgtgttctgaagagaacagtgagtatgaggctgtaatatcacttgataaagaatttatggtattaaaagagaataaatgcaggttttaaagaacaaggatggagatgagacaaaatggacgaatactgtcagattcttcagatttaagaggatggagctacttggttgcaaatgtgcaccattcttccagaacaaagaaaaataaaccttgaatttatttagaagtaatcatgaccactaccttggtttcaacagaccagaccatccatgcttaaaaccttgaggaaaagacctcctaccactgcctggaacttaggaactcccagtgagccttgtgtgtagggctgcatggggtctttgggatgggaccttaacccagcagttacccattggtgcctctacttaaagcattggaattaattctgctgctgcaatgagctgggaaagaagaagcttggcccagagaagattccacttgagccttaaggtctatggtaatttgttttgttatgtgttgtacttgctggggacacatcacccctcctttcttttctatttttctctttgggggagaaaatgtctattttatgcctaactcaccactgtattttgaaatcaaataacttgtccagcgctatggactgaatgtgtatgcaactccaaaattaatattgtggaaccctaatccccagtgtggtgtaattggggtgtgggccatttaaggggtgatcaggtgaaaaggttgaagccgtcataaatgagattagtgctctaataaaaagtcacgggagagcttttctctcttgcttccctgtcatgagatgatacgataaaattacggccatctgcaattcaggaaggaaacctttacatacacatgattggctgtcttgggcttcccagcattcggcactgcacagaataaatatgtcttgttaaagtcatgcactttatgacactttgttaaagcagccccaataaaataagatatctggttttactggctcagagttggagagaaatttgtttcagaaataattctacctcaaatcttactcatgtatggtttagttaatatttaaattatgttttaaacttgtttagagttgatgatgaaatgagttaagagtttggggactgttataatcaaatgaatgaactgcgaatgtgtaaatgccatgcatttgggggatggtcttttctattctgggtctttcatgcctacgtgtgaattgaaggattgcttttcttatttctgtgaagaaggccattattattttgatagataatttatctaatctgtaaataactttgggtagtatgaaaatttcaatactattaattcttccaatccataaatgtggagtatctgggatatatgtcctatttatgtgtgtccatttcattttctattaccaataatttatagttatcctctagaaatctttctcttatttggtaacatttattcctaggtatattttgcagctattgtaaaaggaaaggcttcatggatttcattctcagatgttttgctgtcaacatatagaaatgccaccaattattgtatgtagatgatgaatcttacaactttacttaatttgcttatgaattctaatagtttgtgagaaggctttagttttctttttttaatataagatctttttgtctgctcacaggaaatctgacttccacaattccaaatttgaggtcatttccttttactgttaactaaatactctggctagcatttcagtactattctgaataaaagtgataaaaatggttatttttgtcttcttccacttcttagatgaaaatttcccggtttttccatgcttcgtgtgatgaaagctgtgtttttctcatatatgcgctttattttttgagatatccttcttgtatacctagtttttgataatttctatcagaaatgaatgttgaattttattctatgattttctaaaatatcttgactacacaataacacagtaatatgcaggtcaatacatatcaactgaatttcacttaatatcatcccaacttctaatatttattttttagtattagaacatgcctgtttccatattatatttgctcacaggtattggtacatattttagctaatttgtcattattttactctaagaaataactcaaaaaatcatttttattatgaattgaaaggtaacatcggcaaaattagcccaatcttaatctttcccagactttgaaacattattgaagacaatgagaggggaaagtcagctttagttgagcttctaagaggtaagtgaggtaaaaacccagggcttattggctacgactttgaatgttactgtcttcttttccataagccacatccagaccattttctaaatctaagaaaactaattttatctcactgcttcttagtcttgtttcctgcagctgacaaccaaaactgtcagcgatagagcccagtgtaaatcaccagcctttaattattgcagaactatgattttacaacaacattgtgagttacataatgatcctactttatggccgcggtgcaaatgcttaacttccactaaatcacagagctcagaatggctagcatggaggtgtatatgtatatgtgcattgttctagaaatttccaattactgtatattattgtttgcagtaattaggtcaatctgaactgacaaaagtctccatggccttataagcacagagaccacctccacggcaggtggaaatcaaggctgggaacagtctaccagctgctcccctgggattcctccaattaccctgtttaaagcctctgctcactcatgcgctggaagagggatgtcagagatgcagtctactcttcctaaagggctgacagggcataaagacaagactgattatccatggaacattcctataggaatgcacctatgtgcagacacacaaataagctgtgtgtcttgcagtgtgtaaatggctgagatgccatttacacttctttacacaatacatttttaaatgttttgttgatgtattctctatcattcaaaaaaatcatcactttccccctaaacaaagaggatttttatcagaacacttatgggaagccccttgctctcccagattcccaccctcatttctcctgaaggaagaaagaaaaccatctctattgatttccactctcatcctctaggactaaaaccagaaagctgcatgctccctgggtgagccttagagaagaccctgtctgtaggagcaggaatctcagagccttggctgagaggcatggtcctgaaatgagatggagtcccccatggagatcccacgtggacgcccacacctgagggctcactgctcctcaccacagatgcactcccctactgagtcctgagacctgagtgcaccccatagagtaggactcagatgagggaatgcaaatctccaccagctccaccctcctctgggttcaaaagctgagcacggggcctcgctcagtgactcctgtgccccaccatggacacactttgctacacactcctgctgctgaccaccccttcctgtgagtgctgtggtcagggacttcctcagaagtgaaacatcagttgtctcctttgtgggcttcatcttcttatgtcttctccacaggggtcttgtcccaggtcaccttgaaggagtctggtcctgtgctggtgaaacccacagagaccctcacgctgacctgcaccgtctctgggttctcactcagcaatgctagaatgggtgtgagctggatccgtcagcccccagggaaggccctggagtggcttgcacacattttttcgaatgacgaaaaatcctacagcacatctctgaagagcaggctcaccatctccaaggacacctccaaaagccaggtggtccttaccatgaccaacatggaccctgtggacacagccacatattactgtgcacggataccacagagacacagcccaggatgcctcctgtacaagaacctagctgcatctcagtggtgctccctccctacctctgcagaacaggaaagtgtgactgagatgccatttcctgccagggcttgtgtttcctataccaaccagactcagagccctgtctgttttcctattctgtactattaaatggcatgttccctgttagtgattcacgcaagcagaggctgtatcctgtttgacaaagattgagcatgaaagattcccattacctgggccacatgcatcactgatatgtggccacttatttcttgagctcatatccttccaaggggctgaatacaaatatctataacataggccatcttaaactgcaggaagtaatgttggagaagaatgtggagataaaagagcaggatgattaattaaaatccagataccatctttttttgcagagaaaaatttacactaataaagtaattttatgaaacaacaagaaagatggaatgtgtcctcatcatggagtgtctcacttgcagtgcacaaataaatttctaaaaattttatagggaaggtgtgatagatgaggctgatttccacacagggagtgattaaatacccaggtaagtataaaatccaacacttggaaaggaaaatgcctcagcttgacatcagaaacccagctcagtaagtctgaggagcaatgcggaaaagaaatgaaaaattcgggccgggcgcggtggctcacgcctgtaatcccagcactttgggaggccgaggcgggcggatcacgaggtcaggagatcgagaccatcctggctaacacggtgaaaccccgtctctactaaaaatacaaaaaattagccgggcgtggtagcgggcgcctgtagtcccagctactcgggaggctgaggcaggagaatggcgtgaacccgggaggcggagcttgcagtgagccgagatcgcgccactgcactccagcctgggcgacagagcgagactccgtctcaaaaaaaaaaaaaaaaaaaaaaaaaaaaaaaaaaaaaaaaaagaaatgaaaaattcgacaacacttttcttatgaaatccctagctcatgtttgaacacgaaaacagaattgtccacaattttaggacagccatcgcatgacaacaaaccactacaatgataggagcatcactgagtcaacggagttcaagcagtgagcagatcagtactgaggccccaggagaaccaaggctctttggtacattttacagaacccagaaccgagccacataatctatggccaagtgatctttgacaaagttaacaaaaattaaccaacgtatacaccagggaaaggacaccccattcaataaagggtgctggggatattggatagctatatgcacgcgaatgaaactggacccccaccctcaacatgtaaataattaacacaaaatagattaaaggtttaaatgtaagtcttcaaactgtaaatgtattcaaataaaacaccaggacaactcttctggacaaaaagcaaacaatagacaaatgggacttaatgaatctaacaagtttcttcacagcaacagagtgaacagacaaagtgcagaatgatagaaaatatttgcacactgtgcatctgacagagtactaatatacagaattaacaagaaactcaaaccacaacaacaaaagaaaacaagaaccaaataaccccattaaaatgagcaaagaacatgagtagacatttttgcaaataacacataaaaatggacaatagatatataaaaatgctcagcattactaataatcagggaaatgcaaattaaaactagtgagatataccattcacaatggctgttattaaaaagtcaaaaataacagatgttggagaggatgaaatgtaaagggaactcttagacactgttgatgagaatgtggacgagtacgacctctatagagaacagtatggattcagtatgatattgactgtgcatttgtcataaacagctcttattattttgagatacattccatcaatacatagtttaatgagagtttttagtattaaggggtgttgaattttattgaaggcctttgctgcatctattgagataatcatgtgttttttttccattggttctgtttatgtgatggattatgtttattgatttgcatatgttgaaccagccttgcatcccaggtatgaagccaacttgatcatggtggatttgaaaaccggcacaagacaaggatgtcctgtctcatcactcccattcaacatagtattggaagttctggccaaggaaatcaggcaagagaaataaataaagggtattcaaatagaaaaagaggaagtcaaactgtctctgtttgcagatgacatgattatatatttagaaaaccccatcatctcagccccaaatctccttaagctgataagcaacttcagcaaagtctaaggatacaaaatcaatgtggaaaaatcacaaacattcctatataccaataatagaaaaacagagagccaaatcatgagtgaactctcattcacaattgctacaaagagaataaaatacctaggaatacaacttacaaaggatgtgaaggacctcttcaagagaactgcaaaccactgcccaaggaaataagagagggcacaaacaaatggaaaaacattccatgttcatggataggaagaatcaatatcgtgaaaatggccatactgcccaaagtaatttatagattcaatgctatccacatcaagctaccattgactttcttcacagaattagaaaaaaactactttaaatttcatatggaaccaaaaaagagcccatatagcctagacaatcctaaggaaaaagaacaaagctggaggcatcacgctacctgacttcaaactatactacaaggctacagtaaccaaaacagcatggtactggtaccaaaacagagatacagaccaatggaacacaacagaggtcccagaaataatgccacacatctacacccatctgacctttgaaaaacctgacagaaacaagcaatgtggaaaatgatcccctatttaataaatggtgttgagaaaactagctagccatattcagaaaactgaaactggatcccttccttacaccttatacaaaaattaactcatgatggattaaagacttaaacatgagacctaaaaccataaaaacccaagaagaaaacctaggcaataccattcagtacataggcatgggcaaggccttaatgactaaaacaccgaaagcaatggcaacaaaagtcaaaattgacaaatgggatctaagtaaactaaagagcttctgcacagcaaaagaaactatcatcagagtgaatgggcagcctacagaatgggagaaattgtttgcaatctatccatctgacaaagggccaatatctagaatctgcaaggaacttaaacaagcttacaataaaaaaaaaacaaccccatcaaaaattggcggaaggttatgaacatacacttctcaaaagaagatatttattcagccaacaaacataaaataaagttcaacagcattggtcgttcgagaaatgcaaatcaaaaccacaaagagataccacctcacaccagttagaatggcgatgattaaaaagtcaggaaacaaaagctgctggagaggatgtaaagaaataggaacgtttttacactgtggtcggtagtgtaaattacttcaaccattgtggaagacagtgtggtgattcttcaaggatatagaactagaaatgccatttgtcccagcaatcccattatttggtatatacccaaaggattataaatcattctgctataaagacacatgcacacatatttttattgcagcactgttgacaataacaaagacttggaaccaacccaaatgcccatcaaagatagactggataaagaaaatgtggcacatatacaccatggaatactatgcagccataaaaaggatgagttcatgtgctttgcatggacatgggtgaagctggaaaccatcattctcagcaaactatcacaagaacataaaaccaaacaccgcatgttctcactcataagtgggagttgaacaatgagaacacaaggacacagggaggggaacaaacatcacacaacagagcctgtcggggagtggggggctggaggggatagcattaggagaaatacctattgtagatgatgggttggtgggtgcagcaaaccactatggcctatgtatacctatgtgacaaacctgcacattctgcacatgtgtcccagaacttaaagtatagttaaaaaaaaagagagagagagagaaaggaaacagtatggagactttccaaaaaatgagaaacagtactggcctttattctaccaatcccactactgggtagctacccaaagagaaagaaatcatatttcaaaaagatacccacacttctatgtgtaccacaaatctattcccaatagcacatatgacaacctgagtgtccaccaacagatgattttataaaagaatatagcatatatgcacaatttaatactagtcagccacaataaggaatgaaactgtgtcttttgcagcaagatgcctagaactgggggacattataattagtgaactaactcacaaacagaaagccacatatcacacattattacttataagtgggaggaaaacagtgtgtacacaaggatatggagagagggattatggacattggagacttagcagaatgggagggtaggagttgggagcatgatgaaaaatcacctaatgggtacaatgtacgttacttgggtgttgggtacactaaagccaataccactgtgtaatatttccatgtaacacagttgcacccatagcccttaaatttatacaaataaagataaaaacaattacaatttaaaatataaaattattaatagttgaccaaagatcttgaaaattaaaatttaaatcatgatcaataaatgaaattaatatcagttgaacttcatttaacttaaaatccttttgtactcaagtgattttaagaaaatgaatgtcaagttttagatgaggagatttgcaaatcatatcaccacctatgtaattatagtaagaaccctcaaaactcaacagtgaataaaagaagaggcaacccatggataaaataggcaaaggtttgtgcaggcatttcattaaagaagatgtacagattacacataggcatataaacaggatctcaacaggatttttcatcacagaaattcaaatcaagaccacaataagatacccaaacaccctttttagaatggctgaaattaagaagaaagatggatcataccgatgctggtgagcataccaggtttctagagtctaaaacattgctaatgggaatgcaaaatgaaacagctacacaggaaaataattcttagtttcttgtaaaattatatatgcccttaacacattacctaaaaatccccctcctgtaatacagtaatacatggctgtgtattactgtgaaagaggcatagtgtgaaaacccacatcttgaaaccctgagggagaaggcagctatgctgtggctgaggagattacagggattatttgattaaagacttttttagaaagtgaggttaaatcagccgggcgtggtggttcacacctgcaatcccatcactttgggaggccgaggtgggtggatcacgaagtcaggaatttgagaccagtctggccaacatggttaaactccatctctactaaaagtgcaaaaaattagccgggtgtggcggtgtacacctgtaatcccagctactctgggcgctgagacaggagaatctcatgaatcggggaggctgaggttgcagtgagccgaaatcgacccactgcaccccagcttgggtgacagtgcaagactccgtctcaaaaaaacaacaacaacaacaaaaagaaagcgaggttaagtcattgaaaaataggaaaatataaatgtgtatgcactctaattatttgggaaattttccatacaacttgtattctgtaaacaaaattcagggagtggaaaacaaatcaaattaataaaactgatataagaattcctctgaagatattagtgtgagcactaacacacacttttgaatgggtgttgtaaatattttggaacacacctcttaggtcacattttaattctacatttatgtaaattatataaaatatcgaaattttttaatgtctccattttgtgcagttataattttggtttcatgccagcaatgcatgatagattccgttcttccacatcctcgttgccatttggcactataagcattgtgtattttaaccattctaatctattggtggtgatagctcattgttgtttaaatgcacatgtctctaaaattttatatttaattattttatataattgtgatgaagtgtttgttatggtatttggctcatttttgatagcattgtttatttttgatcagttgtaagtttctttacatacccattatataagtcacttaaaaaagtacttagctggtcatgaaccccaggatgagatgcagactgtatagaaatctctagcaatgttactcagtgtgggcagggatggcatgagatacggggaataaagaataaagtaactttctccatttggatataagatgtgtccattcactagagagttttctttcagaaggttcccatgtgagccagtttccttcctgacaaggaaatcacccagaggattctcataatctcttaagtgagaaaagttttcctcaaactccagctcagtctagctcacactgtctctaaatgggcaattactttcagacatgtacacacatctgtcccaacgtggactcctccctcagacaagcacacacattgcaatgtggactctcccctcagaaaaccacacatgccccacaatgactccttcttcacataagcatatatgcctgatgctgaactgctgtgtagcaaaattagctcagaatacaagcacttatggactctagccataacaatgtgtagatctgcattttattttaaattctaaatgaacattttgccttcttgttaagaacagtggtttacagctctacatgtagagactacaggcagatatatgtttcctctgggaaaagtttattttcatgtatttactgggttattttgttgataaacattcatctataaagacacctgaaaagtgccctcattagagaaaaagaaagtgtagtttgcagattaactctgagcatccaatcccaggaatcctttgatctgccctccctgaaatccacaggcagaggggggatgatcgctgataagtagcaaacacatgtccacaggaagggagacatggaaatgtggtcactcccacactcaagaggagcagctcatcccctgtccgtagtggtcctggtgaggaaccaccccacacctgtgccttcctcagtatccacaccatggggtctgtgctgatctgggcttcccttctcatcactctcaatattagtgtccttgcggatcaggctcagctgtggctgctccagatgaggctgttctcagtctgttccctctgtgtttgcagaagtcctgtgtgaagttcaccgggggagacagaggaaataacggtgcagccgggggctatctgagtctctcctgcaaagactctggattcaccttcactgattgcagcataagcttggtccagcaagctccaggaccagggttgatgtgggcagcaacagggagaaattgaagaggaagctctcagtggtgccctccatgaatacaaagaatcttcacagtccccaggacacccttacgtgcatggtctcactgatatctttacttcctttatcacttttgttatgtaaatcacaatgaatagtgtattcctcatctattatacatttgttaagtcttttttggtgtctttaaaaaaactgataactttatagtatgtaatatccttaagtcctgaaagtgttttttgatgtctaccttgtcttaaatttatacagctactatagcttttcttggttcatgttttctcatatttatcttttctatttgtgaatatgtagagaaactttcttgtacatagctaatagttgtgtattgcttttttattttggcagtccttaaatattctaattttttatgatactttaagttttagggtacatgtgcacaacatgcaggtttaaacaaacaacctcatcaaaaagtgggcaaaggatatgaacagacacttctcaaaagaagacatttatgcagccaaaaaacacatgaagaaatgctcatcatcattggccatcagagaaatgcaaatcaaaaccacaatgagatatcatctcacaacagttagaatgacgatcattaaaaagtcaggaaacaacaggtgctggagaggatgtggagaaataagaacacttttacactgttggtgggactgtaaactagttcaaccattgcggaagtcagtgtggcgattcctcaggtatctagaactagaaataccatttgacccagccatcccattactgggtatatacccaaaggattataaatcatgctgctataaagacacatgcacacgtatgtttatagcagcactattcacaatagcaaagacttggaaccaacctaaatgtccagcaacgatagactggattaagaaaatttggcacatatacaccatggaatactatgcagctataaaaaatgatgagttcctgtcctttgtagggacatggatgaaactatctattgcttttttaaatcaactataataaattctatttttttttttgagaaggagtctcgctctgtcgcccaggctggagtgcagtggtgcgatcagggctcactgcaagctctgcctcctgggtttatgccattctgctgcctcagcctcccgagtagctgggactgcaggcacccaccaccacgcctggctagttttttgtatttttagtagagatggggtttcaccgtgttagcgaggatgctctcaatctcctgaccttgtgatccacctgtctcagcctcccaaagtgctgggattacaggcatgagcaataaattctatttttaaaccaacaatatttttttctgttaatttttgtttaaattaacattttataatgatgcttatttctctattaacatggtatttaattacctttttataaatattgtatagttaccataagatttacaataaaaattgtatgtaattagattctaatgtaaatcctgtgatggccttgatatgaagaacacagatagtgtaactgtgtgctttgaattcctccttctcgccactctttcttgtttattctgtttgcacttacatatgctgtaaaatagaatatgtaattttttattactttatacagttatatcttatagcaattacaaatgttaaagagtacaattcatctagatttttccatttttacaatctttatttctttgtagagatttctattttgagtgcatatcacatggctactcgcagagaatctttgtaaaatgtgccctgaaacatgaatgtgctgacaacacatattctccagatctttttttctgacagaattttatttgccattcacctttaatgaaattttaatgcatgtagaatttcagtttgcatttcacctgtaatttattttcttgtaattattattagtttttcctggagatgatcacacattacattctgctgggcctttattaaccatgtttctgcgaacctagtcaggcttgggtttcaagtgtatggttgccgtggctatcagagttgaaatcagcttctcctgttcacaaaaacttcaggttcctctggtgatacctgcgtttgtgtccctgtttggctttggatcttcacatttcattctccccaaagaaaggctgtctctttcagctgtggcaggtgcatcctgctgacacatttacttggtgactgtttgtgggatgaaggggcttggacacaggggcacgttttccaaccttctggctgagcctccttcttagctatgggtggtgagactggctctgatgcatgatcttccaagtgttcctgttccttcccttcctcagtgtcacagtgtctcttcccagtcatgctgttttttcatcagtgtcctcagcttctgacccactgtccttaccccacagattctggatttcattcctcaggaaacagacgggaggtgattctgggtagagtttccctgatgtcctctgtttccttgtgttctagttgattctaccagtgcccacaggacacaagatttaataaatgtctcctgcatataatgaagggggattcagcattgaacggagctactgttcttcctccccagtcaacaccacaggacagcaggtgggtgagttgtctggggatttccccaattctgtaggaaaagcctgcaagtgccaggagtttcacactctcacaccattagcacacacatcttcaagcaactcattaaacatttccaggttagctttttcctatcttcaataccatgccatgagtggcacctgccccaggtactctaataaacgcaccctagttctctctgcgggcccctattttctcatatttcagggatttttttctctgtgacatcaactcagatatggtgaggggtttattttttgtaattcttcatgttttttgttaacgaggtcagaataatatcattttctcaatttttacattctaacgcttagtatctgatttctaaataaaattcagaaactaagacaacaaatgaagtatccattatttggtgcattgttaaacaatttgagaaatattcatgtactgaaatagaatgaaccactgaaatcaaggcatgcctcattcacataagaacatgagggcattatcaaataattttgctgagtggaggaagctaaagaattcaccatcaatttcatgtgatttcatttgtataaatcacagaagatgcaatattctaaattaacatagagaagatctgaatttctctgaaaatagggtgggcagagtaacaacgtggtgaaataaaattatagacaagttagataaaaaaaattagaggttaacttaattgctaaaacatgattgaagtgctgattcaatgactgcacacatatatcaacattttccaaatgctgcactatcaatttgatttcattattgattgtttttttaataaagcagtaacaaaaatgaatatattggctgagaaagagcaagaaatggataaataccgacacttgaataatcaaggactcctgaaaatacacacatgtgaacactgattgtagatttcaggtaaacactagaaaaggcaaaattacacaaagttgttatgacaggagggacatcctgaaaacctctctaggcatgtcccacaccaccctggagctgtctcaggggagcagtctcctccagtgtttagaggcacaggcacgcataatagggctaactctggccagatgtgtgatattggacacattgcacaactgctctgttctgtatgtaatttatcttctctacaaatgtaacattgacagttgcattaaatatattctgcaaatatgtaaaagttaaataagctgatgtctgctaaatgattaccaaggcacaatcacataatctgaagttatattttccagagtgataggattacctccagagttttccaggacactctcatctgctccgggcactgccttctcctcagccgtcccacccctgagcttgctatatagtaggagacatggaaatagggcccactctctgctgataaaaaccagcccagccccgaccctgcagctctgggagaggagcccagcccccgaattcccaggtgttttcatctggtgatcagcaccgaacacagaggactcaccatggagtttgtgctgagctgggttttccttgttgctattttaaaacgtgatctatagagaactagagatattgagtatgaatggatatgagtgagaaacagtggatacgtgtggcagtttctgaccggggtgtctctgtgtttgcaggtatccagtgtgagatgcagctggtggagtctgggggaggcttggcaaagcctgcgtggtccccgagactctcctgtgcagcctctcaattcaccttcagtagctactacatgaactgtgtccgccaggctccagggaatgggctggagttggttggacaagttaatcctaatgggggtagcacatacctcatagactccggtaaggaccgattcaatacctccagagataacgccaagaacacacttcatctgcaaatgaacagcctgaaaaccgaggacacggccctgtattagtgtaccagagacacagtgaggggaggtcagtgtgagcccagacacaaacctccctgcagggccatgcgggtggtttcctttctcagctgcaggaggcgggcttattgttgcaggactctggagacttattaggttgtgatattttactatggttatttatcatgaacttttttattgggaattgtgttttattaatttttattttatatgtaaggttatttttttaaaatacataccttcaagaaataattcttcctaataatttgcacttgttctttttagagttttgttaacatctgttgatatcagctactacatagctatagggacattaatttacatctatagacatatgtgtaaatacacaaacttatacatatatgtggtcttttatatttaatgttataataaaattattataacaattataaaatacatcctaaagaatgaaacatatatagtaatccatattcctttcaatcattgcctatagtttacataaattgatgtctatttgtaaccttaaacatagtgtattggtcattttcaaacatccaagaacaaatttcaaatgtccttgtcacacacacaaaaataaaaatttgaggatttgaggtgatatatatgtcaatcagctcgattcaattattccatattgcattcataaatcataacatagctttattcactataaatacatacaaccaaaatttctcaattttcaatgaaattttaattatacatattttatctgtcctaggtcatgaatgtttttctccctgtccggatgtgattaagattgtcctgagaaacaaattcagcctcctgcctcctgaaggcttcaggaagcagctcctagatggggtgaagcaggcaacccgtgtgtgtccacaggacccggagcctctctctccttggattaggccccctcctcaggattacagggctcttcagttttctcaacatgctgttataccagagaagcacaaaacacttaatttcattatatttttcttcaatttttcaaaacaacacaaaggtaataattttaacaataaacatattacaacctactatacatgagacccttcctgtgcttcgaggtttcttctcaggactttgtatgtattacatgttttcagttttttcctgagatggaatgttgacgtctccttattacagattattcttttaatttgtctcttagaataattttttccagagctcctgcccgcccgcgcctggcggaatggagcggcgccagggctgagccaggcgcgcaggggccgccgcacgtgccgcgcggggagcggatgcccagcgggcggagagccagcgccagaggccgggtcggagcggccgctggagcagcgtcagaatgggagaacagcccatcttcaccccccgagcgcgggtcttccagattgaccccaacaccaagaagaactggatgcctgcgagcaacaggcggtcaccatttcctgtttctatgatgtcacaaggaacagctatgggatcatcagtgtggacagcgccaaggtgaccataaacaacacaattacacagaatatgaccttcaccaacacgtcacagacgtctgggcagtgggccgacagcagagccaacacggtgtttggtttggggttttcctctgagcagcagctgacaaagtttgcagagaaattccaggaggtggaagaagcggccaagacagccaaagacaagacccaggagaacatggagccctcgagtaatcatcctgagaatcagggcgtggagccccatcttctactccggcatccagtgtcaacgggacggacgatgaaaggcctctcaggccgctgcagccgacacgcacctgcagtctgggaaccacaagctgaaggcggcctcgacgcagagctgcccacgggaagaggtgggagatggagctgcagacccggcgggagaccgacttccggctgcccacggcgctgcaggagtcgacggccagtgcggagcagaggaagaggccgtgagtcagagtgcgactgtgtctctgagaagatggaggcggcagagagaggatcaaaacctggaagataaagtgcgttccctaaagataggccctgaggagagcaaatcccgacagcgccacctggaggcgcttcctggtggcgctggaccggaagatccaggcctgcataacttccgcccaggcctcccaggctgggcaccaacaactagggctggcagaggcccgggatccccaccgtgagtcctaagtatgtgtgcgagaccagatggcgctaggacgttccctgtgtgcgttgcttctgtaaatgcaggcgccgtgtgtcgtgtttccaaaccagttgtgccatccactcactcctttccagaatagaaatctctcgcttctctggccttgtgaggttgtggacaactggaagattctgactgaggaaaccagaaccaggtctaccttcaacatttacgcagtcaggccagggatgtttatatcgttcataagggttgttggaaccatatgaactgaaaaaaagcattttctcatccaaatattgatattctttacaccaggccatcgggctccttttatccgatagcattcagagtatttgaaggtcctccaggtgccagccttgggggcacagggagaacaacattcctctccgaaaacatggggaagctttaaaataactgtttagtggagacttacccagagatggaaaacaggtttctggtgagtacattttctggtttgggaatcacctgcatccccgatcctgccccgtgccccccagtttgtatggttgtgacaatgttccatttctttgttttaatttctgagcagttgactgtggtgcgggaacagcacacagtgagggtgcctagcacaatgcctggcgcaaagtaggtgctttataaatatttgttcaattaaaaaaagagggaggctgaggcaggagaatcacttgaagctgggaggtggaggttgtggtgagccgagatggcgccacttcactccagcctggcaacagagcaagactccatttcaaaaaaataaaataaaataaataaaataaataaataaaataaaaaatattttttccaagccccactcaaaaccatggtattgttagaggtgtaatagttggaccaacattgaaaatacattccatttagttcatgggcgtgcaaatatccttttttctttaaaaattgttctcagttgtaatattacaaaaaatattggtaatttataccaatgacacaggttaaaatgttgtataaataatttaatgacgtttgattggaaaaaatacatgtgccacatgtcgacaattttttccttctctatgaaatatatactcattaataagtttcagatgttacagttatctttttgatttctgggatttaattttagtaggtatacttgaatgcattttattaattcctataatgatgttgatatttcatgtaggattttaatactaattttactatttactgaattttaaactattctacatgttttatttatataagaaaaaaattacatatgagaaaaaatgcgtagacctgaaatgtatcactagagagtttctgtcaaatgtgaatacctttgttcccaacacctaaggtagcctgaagagcaagtccttccccacaacatgcgtctttttctgtgcttgcggtcagctcctgcatggggaaatgttttgatttctgacactatagatccattttttttctgttttgaactttatataaatgcaatcaaacattttagaccttaatttggtaatgggctacattgctattttttgaggttatttcctgctatttaaggtattaaattagatcaacatattatcatttattcaagtaatggactgactctgatatgaaacctcaaagttttcacatatatatggagagagagagagagagagagagatgagggagagaggttttatatctgagtcagtctgttaaataagtaaatgacagtattttgatttattttcctgtaaatcgactttaaatttgtttccagtttatgaatattataaacaaagctgttacaaatgtcttagtgtaagttttcctatgttgtcttctttttattgagaaaatatgaagtatgtatttattataagcttaaattttttcagttttattgaggtataattgaaatattttaataatgtataggtttaaggtgccccacttgacgttttgatgttgtattagtccattctcacggtgctataaaaaatgcctgagactgagggatttgagaaaaaaagtgtgtttaattggctcacggttctgcaggctgtacaggaagtgtagtggcttctccttctggggagagtcaggaaagttaggatcatggcagaagacaaaggggagcaggtgcgtcacatggccagaccaggagccacaggaagcagggaaggtctacacactgttaggcaactagatcttatgagaactcacacactgtcatgagaacagcaccaggagtttgttctaaaccattcatgaaagacccaccccatgtcccagtcatctcccaccaggtcccaccttcacaattgaggattataatacaacatgagatttggggcaggacacagatccaaaccacatcagatacacattgtgaaatgctcatcatggccaaagtaatttgtatatccattttctcatggagctaccattttatttttttaaaatgtactacatgtgtgtgtatgtgtgtgtgtctcatgagaacacctacgatctacccgtttagcaaaaatcacatttacaatacagcattaaatacaagaacattgcagtacattagatctgcagaactcattcaccctgcacaactggacctctacccttcgaccgacatcatctgatttccctctcctcacaggcctgggacccactattctactctctgctttcaagagcttgaatattttagatcccacatgtaaatgagatcattaagtctttctgcatctggcttattccactaagcatcatgtcctctagccccatccctgttgttgcaaatgtcagaatttccttcttttcaaagcctaataaaattcagttttctgtgtacacattttctttacacattcatcaatctgtggtcattaaattattttacaaatctacactattataaataatcttgcagtgaacatgtgtttgacataataattttatttcttttgaatatatgacaagaagtgggatcaccagagcatatgatagctttatttttcaatataatgaataaccaaacctaccacaccatgcttttgaagtcttagtcatattttatttgcctaggccaatgtcccgaaaaatttctcctacattttcttcagtttgtacatttaaatattgaatccatattcaattaatttttgtctatggtgaaaaactagaagtctagttttattcttctatgtgtggctgtctaagtttttcagcaccacttactgaatagagggttgtttctccattgcatatttttgtcagttttgtcaaagaacaggtggttgtagaaacttgtctttatttcttggctgtctattcttttacattattattattgttattgtttttagtagcagtaccatgctgtctttcttactgtatctgtgtagtataatttgaaatcagggaatgtggtgctttcagctttggtctttttccttgggatttcttttgctattcaggctgttttttgattccatatatatttaaggattttttttaaaacatgtaatcaattatattggttacttgataaaaattgcattgaatatgtatcttgctttggacagtgtattagtctactgtgcattgctataaattaatgcctgaggccaagtgatttacaaagaaaagaggcttatttggcttacagttttggaggctgtgtgagaagcatggcaccagcatctgcttcttgtgagggcctcaggaagcttacggtcatggtggaaggcaaaggggaagcaggcagtgtcctgtggtgagagggggcacagaagaggggaggagggtcgctagactgtttttaacaatcagatttcaaattagctaataaagaaataattcactaattaccatggggttgataccaagccatacctgaaggatcttttccccacaatccaaaaactcctactaggacccacctcaaatattttggatcacatttcaccgtgagatttggaagggacaatcacctaaactgtagcatttcactcttgtgtcccctggtctcaaatccttgtaagattgcaaaatcatcttttttaaaaatagttcccaaaagtgttaacttgatcaacctccaactgaaaattacaaagtctcgccagggtcttaaggcaatttccctccagctgcgtgctggcaaaatgttttaaagagttatgtacttccaaggtgcaatattgccattgggtaaatattgtcaatacaaaaggaataaattggccaaaggccccacacacacctaaagcctagcaggacagatattaaatcttaaagctacaaaataatctatcttgactttatgttcttagtcagggtacaccaggacaaagtgggtcccaaaatcctcaggcatctcatccttatggctgggcacattccatggggctaataacacaggccagagtcaagtgccagaagtagttccaggttgggagtacaagctgcctttggatctaccattctgggatcttgagggttgtggctgcatttctgtagctccactgtgaagtgccctagtggggactctgaatggggttccaaccccatctttccccatctttggtactgccttcgtagaggttgtttgtggtggatccagtcctgtagcaagcttcctcctgggcacatagggttctctacacatcttctgaaatctaggtagaaactgcccagcctccttcactcttgcattctgcatatctgccagaatccagttatcccagcaccatttactgaacacagagtattttttccacattgtttgtttttgtcagccttatgaagtatcagacggtttaggtgtgcagctttatttctgtttcctattttgttccgtttcttctgcatatctgctcttgtaccagtaccaagctgtttttgttaccatgtcattatggtgtagcttaaagttgggtatcatgatgcctctggcgttcttctttttgcttagcattgctttggctattcagggtcttttttggttccatacaaattttagaatagattattttttctaattctgtgatcaatgatgttgatagttttatgtaaatagtactgaatctctaaattgctttagacagtgtgataatttttacaatattccttcttctaatccataagcatgaaatgttttcccatttatttgtgtcatgtatgatttatttatttatttatgctgtgttttgtagttctccttgtagagatctttcaccttgtttgttacctgtatttccaggcatttcatttgtgtgtgtgtgaatattgtaagtgggataggactgtgttcttgatttcactctcagcttggacatagttgggtatagaaatgttagtgattcttgtacattaagtttgtatcctgagactctaccaaagttgtttatctattttagaattattttggcagagtctttagaattttctatgtatagaattatatcatcagtttggacagatatatctacttcttttcccatttagatgttgtattagtctatttgcacactataaagaaacacctgagactgcataatttataaagatttttgattgtctcatggttctgcaggctgtacaggaagcatggctggggaggcctcaggaacccaacagtcatgacagaaagggaagcatcatgtcttacatggctggagcaggaagagagaggaggtaggtgccaagtacttggaaaccacatctcctgagggctctgtcatgggaacagcacaaaagagggtgaagcatccccatgatctaatcatctctcaccagtccccacctccaacactgggaataacaatttgacatgaaatttgggtggggatgcaaatacaaaccatatcagctccgttttattttttctattgcctggttgctctgactaggatttccagtagtatgctcaataggagtggtgagagagggcatccttgtcttatttcagttctcaaggggtttgagcttttgctcactcagtataatgttgagtgtggttttgtcatagatggctgttattattttgagtttttttttttttttttttgagacggagtctcgctctgtcgcctaggctggagtccaatggcatgatctcggctcactgcgacctctgcctttcggggtcaagcgattctcctgcctcagcctcccatgtagctaggattatggttacgggcatgcgccatcacgcccagctaattttttgtatttttagtagagacagggtttcactgcgttagccaggatggtctccatctcctgacctcgtgatccgcccgcctcagcctcccaaagtgctgggattagaggcgtgagcccccgcaccaggctattttgaggtattttttgatgcctagtcttttgagagtttttatgagtgaatgttggatctcatcaaaagctttctcagcatgtattgagaaaatcatatgttttttgcttttattttgcttacatggagaatcacagttactgaattgtggatgttgaatgaaacttgccttccaggggtaaagcctacttgatcatgacgtatcacattttaaagtgcttctggattctatttgttagtattttgttgagaaattttaggtctatgttcaccaagaatattcatctgatgttttcttttttaattatgtatcttcctgattttgtatcccaaggacacacaatgaaggaaggacagtctcccaacaaatgatgtaaaaactggacatccatatgcaaaataaataaaattagaccttctctaacaccatatacaaaaatcaacaaaaataaacataacatgaaaccataaactcatagacaacatggaaaaataattcatgtcattgattcagaaatgatttatttgaagttaatcccaaaagcaagcccagcaaaaaactacatgcaattatatatctgacaagaagttctatcaaaatgtataaataatccatacaactcaatagcaaatatcaaatgacctcataaaaagagcaaaaacctgaatagatttttttcagaagacacatgcatgaaaaacagagcataaaaatgtcctcaagatgactaattgtcagaggaattcgaatcaaaagcacaatgacatatcacctcacaccacttaaaatggctattatcagcaagacaaaagataagaaatgttggcaagaatgatccacagccataaagagagctttgattggccaagagactgatttcagtaactttctcctgtgaagagaccactgaccatggacttgtcctggccaatttccagaggctgtgcactgtgtgtctttctgcccctgcacaaagcccttttgatatgcaggacccagctgtaattcatttagttcttaagtcctcaccccaaagcaaagctgaaatgcatgtatcatgtgtgtttgcttattagacatgagagcctccacgccatgtgaatatccatagctccttctatagcctgctgagtgtgtacactcggccaatccatttgcacaaatttgtttctcatctttccctctcttaaagtgcctgctcacagtctctgtgggaggctttccttcccagcctgttaagatggccgtcctgcagcttcaaccctttctgagaaataaagtctcctttctaaatttataaactgggtgattcttccgttgaaagcacaagctgttgggaagagttatatggcaattccataaatgcctggaagacaagtgtggatagggtagggtaagaagtcctgggggctgcacaccccactctgatggaatttccctccagaaacttctgggttctcaagatgagaatccaaacagattccctcatggctctgtcatcaggagaactatactctgataagtatgcccagaacttcctccagacagaccctatagggaaaaaatacttttcaagatctttattctgtgaggggaagggattcttttccatcccagacagcttcatcttagccttcctgagtcatgaaaaggagtataattaataaaacatctggggtcagattcaagaaaataatctgtggatgctgcagccaggagggggagtggaggacggaggaaaatcagctgtaccactgaatactccttgtaaatggtacagcctagagaaagaatagcaagaaatcattggaattcaatttccagaacatatactgctcccctacccaccacatcacctcaccaccaatatgattaatctggattaaagagaaaagtgtggaaaggcacagactccatctaaggactagaatttagggaaaccaaaggcagtgggagagaaaaagtcaaggacagtaaagtgacttaaaacctcttagaccaacagcttcaggaacaaggtcacatcctctccctcactgaaattagatttacctctcatggggcatctgcagggtgcgcaggtgagaactggcaaagagaacatgaaggcactttccaaatctccattagtacctagctcgctttagctgtttggaaaaagcaaaaccacaacaaacataaccaggactaggatcagtgttggaagcacttttcactggcaagacactaagaaggagggcaaattcgaggccagttactatgcaaatatgccactgtgagtgtgtgtggtggtgagctttgagacatagggtctgtgggtaaagttataatcgataaaatcttcaaccacagaatcctaaaaaaaagagccttccccaaagtcccatcagttcctggactcgccatgtgtctggaccgtatcagtggatccggagctccagggaaggggctccctgatggcttttatgattccttgcttgccgtgctgaggtctccctgtagattatgttgggttttctaaggcctattttctattgtaagaggtggtgggggaaacaatttctgtcactgaaagagcattctgagccagggcacagccccttcctactgagcttgagattctgggaggaaaaagttctctgacaggaggaaaaagttcccagacaggaacttccctgcagggcaggagctgagcggcagggggcgctcagggagcacccagcacaggacccagccctggggcaggtgcacaggaggctggggcagggttttctctcaggaattgaatgttccttatttcaaagcaataatgacctaacatttaaataagaatttagcaagtactgatgtgcctgtaagtattttattgtatacgcagcctatacctaacccaataatttaatgcaaaccggatttaaaaggagaaatgtctaggtctttcaaatgtatttctagttaggaattgaggggtggttttattaattcaatgggtgttactgtccggagacacactcatcccagaagttagatgtgcagagggcaaggctcaggaaaagttcaggtagacagtgagccatatgaacagggaatcacattgaggaccatgtcctgtgagattctgggtttctgtgagaggagttctgtcttcatggacttctgggcatgtcagaggacaaatattaaacaaagttcagggcagggagctcagcatcccactgtggcgtggtccacatgtcacctatcttcttcctcagggtggcgtggcctgagctatgaaaaacctgcctcatgaatatgcaaatgcactgctgtctaccgaggtaaatacagatctttccttgcccagagaccatcacacaacagccacatccctcccctacagaagcccccagagcgcagcacctcaccatggactgcacctggaggatcctcttcttggtggcagcagctacaggcaagagaatccttagttccagggctgatgaggggactgggtccagttaagtggtgtctcatccactcctctgtcctctccacaggcacccacgcccaggtccagctggtacagtctggggctgaggtgaagaagcctggggcctcagtgaaggtctcctgcaaggtttccggatacaccctcactgaattatccatgcactgggtgcgacaggctcctggaaaagggcttgagtggatgggaggttttgatcctgaagatggtgaaacaatctacgcacagaagttccagggcagagtcaccatgaccgaggacacatctacagacacagcctacatggagctgagcagcctgagatctgaggacacggccgtgtattactgtgcaacagacacagtgtgaaaacccacatcctgagagcgtcagaaaccctgaggaatgaggcagctgtgctgaggctgaggagatgacaggatttatgaagtttaaatctgtttagaaaatgggttgagtaattgagtaaaacagcaatggaaagatgtgtacactgtcattatgtaggaaatagtattttcaactgtcaccctataagtaacactcacagagtgggaaaggcagccatcaatcaagctgatgcaaacattcccatgggggctttgtggggacatacattttataattggatctataaatcattagaaacaggattgcttgatctcatggtaagactaaatataatttccaagaagtggccgaaatttcttccaaaatgtctttgcccttccttttacactgaatttattttaaaggagttttaggatcacaacaagtttgagtagaagaaacagagttcccatgcactcctgccccccgacgctcagccttctctgctatcaacaccctgcaccagtgtcataaatcggttacagaggatgaatctccacagacacattggttgtttccttttctggtggtccctggtataacaagcctcaactatcttgaagcaccccaggttcaagtggattcttcaagtgggttactgggaatgatgccaggtagaaggaaagtgggtgggaccattcctctttgcactctttcctcaaggatccataaaatgtacatttacatggagctcctctttctcctggttttatatgcctcttccccaatggtaaggtttcccagtgtttacagcgggggtccccagtccccgtgctgtggatccgttaaggtgtgcagtgcgttaggaaccgggccacacagctggagatgagtgggggcgagccagcatcgctgcctgagctctgtctcctgtcggatcagctgtgcattagattctcctacaagccgaattcactttttttatatatatactttaattctagggtacatgtgcataacgtacaggtttgttacataggtatacatgtgctatgttggtttgctgcattcatcgaattctattgtgacctgcacatacaaggggcctagactgagcgctccctatgagaatctaatgcctgacgattgcagggggaacaagttcatcccaaaaccacccgccgccatcatccatggaaaaattctcttctaccaaactgttccctggtgccaaaatggttggggacactggtgtagaggcaggtctgtaccttggaaagccagcagcttctggtgaatcccataattaatgtcctttaatgagaagtggagactttggtcatgagggccttcgtgaataatgccctacagttggattcaaaacattgtaagctcttggggggtgtttctggataaagccctttgtgcagaaaatgcagacacatccatgggatccatgcaggaaaaaagcttcctttacaaagtggtttggcacctggaaggagctctcagggttgggcactgtaccctttgctggctgcactttagccagaggcttaagcctgattggtcttgcagtgggagagccttcctggggtcaaaggttacaaaaatgcctgtcatcttccagctgagcaagcccatctgcgtgcttgtcagtgtcaaccccatgaggggtgcactctggaagatgacaagatgcacacaaacctcctcccactgattatccactaccacacactcagctgcaacccgtgctccagaaacggacaggggcctgcaaggataaacagaacggaagtattttattacctgggaaagcactgccaaatgccacgtttcaggaaggttaactcataagtgttcaggaagtgactgaagggcagtggtgggtgaggtgacaggactgcctcagggcttcacatgaggagggctccctcccacacagccttttcctccaggagctgcaccaggaactcacagaggatcaggaaggattctgagaacattcttctgtggcgctgactagaggggcaaaataaattataaaaaataaatcaattctaaatatagtatgatgtttgttattagaaactatttctggatcctgtgggaaccctgacataagccaccattctctgtgaacaaacatttaacctctccttccatggggaggtcgacgagcttggattggttctttcatggatagtatcccccaaactcctctccactccctgcgtatcccccggtctctcagtgagaagttctcctgagtggaatgtggttgatgtagtgagatcttcaaatttcccgtcttctgtgttctcatgttctccccttatctgagattaagaaatgcacctgcatgtagtaaattatagcctactgtctctcatggacaaaataatggccacaccaaccaaccctgtggctgacagcaaccactggcggccaccatcccctccacagcctgtgttggaacatcacctgagagattgtgttagcaactttccttcagaatcatcttaaaaactttgtgtcccatttcacatggagacgtcatttttccatttcatcttcatagagaaatagaaggagaagaataccaaatacacttcctatctccagattattcaaatataattgtccctttatcaccttctgatttctggtcttcacagaatactctacaaatttttctcactggcgttataccaaaagttgtgaagcaccagatactgggattaatttaaccaacattattattctaataattcttagaatttagaattacaattatcatcttttcgtatacggataaactaacctatgcctttgaaaataagcccttacatgagagtgaaaagctatagatttggaggatttccttgcaaatccaatatttggaaaaggttttttatcacaaatatacaaattaacttacaattgaacaacaaaaccacagaatttaattttaaaatgggcagagacccgaatagaaaccatatccaaaaaacaaacataaaaagtgatcaacttgattttcattaggtgtacttatgtttaatatttaaaaagttctactaaactatgagaatgggtaaaaattacaaggtagacaatatcagatggtgatgaggaagttgaaaaacaggaactttcaccccttgctggtgggaatgccgaaatggcacatagaaaactacagttaataatttattgtatatttcagaatagctacaagataagatttggaatgttcataacactaagaaataatcagtgatagagatgaaggatatcctagttatccagatttgatcactgcacataaaatgcttttatcaaaatatcagttgtaccacctaaatattttgaaatattgtgtatctatataaatcaaacattaaaaaacaccaatgcagtggaatccagctaattgcagattcccattagatgggatgtgctgcatgatctgtaaactaatcagaatctgtgggtttgtaaaggactttagaaatcaactaggctgcttgtttctaaagataagtctccctagtttaaatattttcttaatgggtgacgattttgaacatagaagaaatagtaatatttgtgtcttgtaagttttcttcttctcatgtcacgagaaaaggtttgcagggaggaatctgggaccatctttcaagtctcaacttcactgtgattacctcagtaagtattttctgatacccctgactaagataagtctcgtatctgtcctagaaactaaaagtagaattctaagcatctacctgaccagatggacccttcctcttgaccaaggagttccagagacacttttaaacctagctccggccgtgttagaaatagaggatcagaaatgcctcattataccctcctccctttggaattcaagcacaactaaccagcatttttatgaaaacagagcttaaggctcagaaaacagattatttgtagcagtaagataccaaattctaaccttactcgagaatatcatcacaggacagagagcaggcattgaaaggaatcaaaggcttttaccctaaaatatattcctttgacatattttaaaatagccaggcacagttatcttttgtgagagagatttacattctgtagagaatctccttccctttccaggtctttttcttataccgaggagattagctgagggtctagcttcttttaaaggtcttaggagaaaacatttcccagctattgcctctaaaggtggtcacataagagacttcatctacatagtaagaatcttgttctccaaaacctgttatcttaacctagaaacatttttctaccggtttcaggtctttagaaaaaagcttaaatctttcaatcaattgtcaatcagaaaatattcgaactcactgtaagttgtaatccccgccccacactgcctcacttctagctgttttgtctttatggaccaaatcaacatatatctcacatgtattgtttggtgactgtctctctagtacactaaatttaagctaccatcaagccactttgggcacatgttctcaagatcttctggggctgttcacagttcatggtcctcacattcgcctcagaataaatctctctaaatattttgcaaggttgctttttcatcagtagttctaacagaacctactctgtggtttttgttaaaagcattatattaatatagtattagtaatattagtattagttataacacatgttggaaaattcttatgaagttatgcatagactaacaatgggatcaagtgtaaatgtttcaaagtatttaagcaagttatttcaaaatttatcttctgcagatacttctatcagattcattatatcagctaattacttgctttatgatttttgcattttattgtagatgatcacaccctatattttcttggcctttatcgtagaaaattgtgtgaaactagtcagggctacatttgcaagtaattgtcgcagtggctgcctgaattgcagtgggtttcctctgcagccaccagtcactcagattactccaatgacaccttaattttgtttcctgcttggctttgggccttagtcttgtgctctccagacagactctgtctttcatctcccctaggtcaggccagagccacatggacctgatgattgtcaatatggtgggaagggtcgcactgaacgggcactctctgtccttctgagggagccatactgcaggcagacatggcagtcctggctcagggtgtgtccttccaagtatccctgcccttcctgcaggtgtgatgctgatccatgcatcttcctcccattcctgggtagagggtctccttgttctttccccaatcttctcccagcagccactatgtcttcccactgatgtcttcagcttcctcttttctgcccttcccagcagatgagtctgttattcctgagggaagagagaggaggtgggagatgaggctgttattcctgaaagaatggacagagctttggagcttttctttcttctaccccagtttctacgagttcctccagtgcctgtaacacagagctgtcagtggctttgcccctgcatgttaattctttggtcatgtagtggtggtgagggagctgggtctggatgcatttcagccacagctgctgttccacttccccacacagaaccgtctcgggaggaagaggttggagatttttctgatgtgtcctcaatcctgggagaaaagttttcaatagcaataggaatctctcagttgtatgtccgctgagaatttaaacaataacttctttataatactaaattttaaacaatccaatgaatatatctaatttaattttgtattagcttatgtgacatttgctggcctctcccccagataaggtcatattctcttcctgtttgttcctgcaagtcactgaatttcacaagatgtaaggtctcttgattatactataacatcaataatctggtgtactaaagaaaatgtgctaatttgcagcttactaaaattagttgttttagtaaaaataatatatttgttatagcatgcctacatctccaggctgagtagaagctttatttgtaatactcagaaactgcaaataacacacatattaaggagctttctaaataaatactatgggtgaattctttaactggaatactgttcctcattagaatcaacacattctttatacacaaccaaattactgactcccaagtaattatactgagcaagaagccacacaaatgaaattgaaaatataagatttcactttaacaaaatcttgaaaaatagatctgaattaacaaagatgagaggttgactcagtatggtgagagggaaataatggggaggcaggaatgagaggaacacagggaggcttttaactgtaatcatcgttatctcgattgttattttggatacacaggtgagcacacgtgaaattatgttttttttccttcggagacatggttttgctttgtcgtccaggctggagctccgtggtgagatcatagctctctgcagcctcagaccctgggtctccagcaatcctcctccctctgccctatgtagctgggactacaggggtgcaccaccatgctcggcttcagtgcgtattaaaccgcacacttcaattatgcagtatttattatatagcaataatgcctcaataagggtattacaaataagtggataatttgttaaagattgatggaaagatagataccaacatgagaaatgtatgacactcaagaaaataaaactgtaggaaacttgcttttctttatatttgttaggtaatcaccacagtgtgtacacatcacaccatgttcccattacagagaaaaggttctgcgaacctcacgagctgtgacccctgtgtgctgggcttggttcagggagaagtcaggtccagtggtgagaagcacaggcccagatgcccaggctcactctgaccaaatgtgagcactggggacattgtaaaacccacctgtgcttttgctgataatttttcatctttaacatggaaataatattgatactatataccatggtttctctgcgtatgtaaaaataaaagatgattggtgctaactttaaaaatatgcagtttatgtagatctatggtacctcaataaaactgttttaaaataaaaattacaaaattataagatttttaggttttaaggtttaagtttatcacaaaacaaactgacaataggaaagcacaatttcccaatgctttcaatatcacagatctccccgaggacattctgacatgctctgagccccactatctccaaaggcctctcaccccagagcttactatatagtaggagatatgcaaatagagccctccgtctgctgatgaaaaccagcccagccctgaccctgcagctctgagagaggagcccagccctgggattttcaggtgttttcatttggtgatcaggactgaacagagagaactcaccatggagtttgggctgagctggctttttcttgtggctattttaaaaggtaattcatggagaaatagaaaaattgagtgtgaatggataagagtgagagaaacagtggatacgtgtggcagtttctgaccagggtttctttttgtttgcaggtgtccagtgtgaggtgcagctggtggagtctgggggaggcttggtacagcctggggggtccctgagactctcctgtgcagcctctggattcacctttagcagctatgccatgagctgggtccgccaggctccagggaaggggctggagtgggtctcagctattagtggtagtggtggtagcacatactacgcagactccgtgaagggccggttcaccatctccagagacaattccaagaacacgctgtatctgcaaatgaacagcctgagagccgaggacacggccgtatattactgtgcgaaagacacagtgaggggaagtcattgtgagcccagacacaaacctccctgcaggaacgatgggggggaaatcagcggcagggggcgctcaggacccgctgatcagagtcatccccagaggcaggtgcagatggaggctgtttcctgtcagggtgtgggacttcatcttcttctgacagtttctctagtgaacctctctaacctcagaattctgtgcttactaatgtcatctctacgtattttttaaaagatcattttaatatgagcacctattctcacacgcaccaaatgcagattgacgcttacagagatgaaaagttctcaaccatggtcaccaggatgagagtcctgaggaaactcaggggtgcctggtgactcttccgcaatcagtcctgggacagaaacctcagggacagcctttatgagttttgatcacatctaacagagaggatgggccagggccagagtcatgtagaacctcacaggttccacgtctgacccttctcctgacactaaagccaatcagcatcagcactgacctggtgctccttttgctcccaatccatgttctttctttggagagtttcttctcccttttttatttgcttttcctgtttcctgaaaaagaaacagatggtccccttggtccacattccagggctcaaggcattttcttggagctcaggtggggctcaggctgtggctcctgcagccacgtgggagaggctgatgggacttccttctctccccattttctcaggaccctccactgtgttgtgtgtaggctcatctgggaatgcagttgaccattaatactgaaggggacaaactcatttgatcaaaatgggatgtggatgtggagttaaccctgttccgtgcacagtgtcagagtcgtctgcttcagaagtagtgttagaaagagctggtgaaatttatcagaatcaagatggagccacttgtgttaaagccctaatgaatgaagctggggaaggccatgaaggagggttctaacacacatattcctgataataagaactaccataaatagactctgcacaaccataaccttgcacagaagccaccacaacattaaaagaattacttctcccagtgtatctgcccagcaactccctgttcaactttacaccgatgtgcccctgttattgatccttctagcccaggacaattgtcttaaacagctgatgtgaccctcctcatttttcctttattctttatcttcctataccaacctgaatgcacccatacatttcaattgcaatacacttcctagaatacatattattatattttagagtctctctctctctgttattcagggttgacaagctacagatggacatgccactttctttttttatgactttttttaaaaattttattattcttgtactttaagttttagggtacctgtgaacaatgcaggtttgttacatatgtatacatgtgccatgttgttgtgctccacccattaactcgtcatttagcattaggtatacctcctaatgctctccctccccactacccccaccccacaacagtccctggagtgtgatgttcctcttcctgtgtccatgtgttctcattgttcaattcccacctatgagtgaggaaaaaaatgatgagttcatgtcctttgtagggacacggaagaaactggaaaccatccttctatcattctcagcaaactatcgcaaggacaaaagacatgccacttttctgtgagatgtggaggatgacagtttttggagatgtctgggaatacccagtgtccagaagatcatccatcaataagtgcaggctggaggtcccagagagaggcaaagctgctgaaacaccatggaatttcattttctccagttctgctctgatggaatcaggcccacctgttttgcttgtcttaagtaaattcacagcaccacatatattagtgttgcagtgaataactacaaagtctatcctaaccaagtgtaccatcaaatttaccattacccagagggaagaatctttaacatgagatctatgttcataattttttaaggtgaaaaagtgatcactatccaatcaggcaaatatgattttgctaatgagtggtagatgttgcatgtatttttggatgtcatccctttttcagatgcatggcttgcaattatattttcccattctgtaggttggaattatttccacactttgtagaatctttttgttgtgatgtagttccacctgtttaattctgcttttgttgtctgtgcctttaatgtgaaatataggaaatcattgttaatatattattttctgggtcggggaaattttacaattgcaggccatatgtttaaatatctggcccattcagagtgatttttgtgtttattctaacccaaaattcttaactctttgcatgtgtacatccagtttttctaacacattcatagggagagacttggtttatctgttttatattgtgggttcttatgctgaaaatcagtttgccattgatacatcagtttatttctgagctctttctacatatttatgccaactccatcctgtttttattattctacttttgttattacttttgaaatctggaagtaagatgtaagtttatttttgcctttttacagatgctatagcaaaatattttaacctttcactcttccatataaaagtatggctttaaataatgacttttattatatacaggttatattcttgtattcctaacttttagaggttttattatgagatcttgaattttttaaatgttattttctatgtctggtgagaagttaactgatgcttttcctttattctcttaatttaccacatcagatttattgatttgaagatattgattcatcagcgcatctcaaaaataatttggagcttgtcatggtgtacaatccttttaaagtcttatagaacttagttgactatgaattgggagtagcttgtttacatatactaagaacatttgtcagaagtttggttttcttcttttgccttgtctattactggtaatacagtgattggagcctcttagaaagagattagaaggtggggacctcacggattttttaaaaagttagagaacggttgtcatcacttttttaaacgctgagagtcatttgttatctaatatataacccatcatgaggaatatctctagtgtgcttgggaagcatgcatattacgctgctgttggttggaatgttccgtagatgtctgttagggcagtttgttcgagagtgcttaagtccacgggcttcctaagaatttttctgtggatgctctgtacattattgaaggcgaggttttgaagtctcctaatttttttatagttttctatttctccttttatacatcttaaagtttcataaatgtagttatatttctagtttttcaaatatgtaaaagagaaataaaaatatttgcttagtaattttaatgagaaaatcacataacaagaaattatattttccaaatgctgccatcaacactaaactcctccaggagtctcacatctgccctgggctctgctctctcctcaggcatcccacctcagcatttgctgcagaggaggggacgtgaaaatagggccctccctttcctgatggaaaccatcgcagccctgagcctacagctctgggagaagagccccagtccagcattaccaggagttttgatttgacaatcagctctgaacacacatggctcaccatagagttagggctgagctgggttttcttgttgctattttaaaaggcaaataatggagaactagagatattaagcatgagtggatgtgagtgaaaatacagtgattatgtgtggcaggttcggaccaaaatgtccctatgtttgtaggtgtctagtgtgaggtgcaggtggtggagtgtaggggagagacaagaggcagaaaagtgtgcaggaggccgggtgaggctgtagacactgtcagcccactatgccaatcccaccacgagtgctggagaaggtgggagtctgatgaagcttactaacaaccctgtggtccaagctaattccatcaaggccattggttcttcccagagcatagctgtccatcgggaatctcccatgtgcccagcagcagccacgcgttagcaacttcactgtgcacagtcattgtttgggaggagctccaggatgtgtctctttgtcaaaaactgggtgatggtgtcagagagctgtgccgggtgcctggtccacgtgctccctgacattggaggtataggaggtgcgttctcagggtggaaacaccttttatggaaatgtacataataaatcacgattttccttggttctcttagacgacatggagaagcaagcatgcaccctgcaaacaattgtaatttcctgctttaccccaagttcatgatttcttgtaaactttgatttctgtccaagtacagagatactgattagagtgagtttggttctttccacacactaaccctcacctcccccagatagagcacattgtcctcactctgagtctgagggaggagctgttcctgtacaactcagggactgcagagacccccgtgtgcagctttgcagagtcagatctttcctcatgtgaggcgacctccactgcccgtgattgctgctcaggtctaattgtggattcgggattatgacaccctttgggctatcacaggtcaatcttattctgaaaatcaccgtaattatagacagaggtaataatccagtacccattcttctgtccgcagtttgtctttcttatttggttgaaagtttgaagaaaaaatgtgaccatatattcatctaattctaacctctgaatctgctatttgctctcggggacctacaaattgcaaaacagtgagttcttcattttcatcaaaatgtgcaaatttgtgaatttcaacatgttgttcagaacctgtgcatgccgacaactgtgattctcggtgcactcctggcctggtgaagccctcacagatcctccccctggcctgtggcatctctgcttctccattacaaccagtgcttcctgctggagctggatccgtcaccccccggggaagggactggagcgaatcaggtgcacaggtcatgagggagtgcacaatccaacccactcctcaagagtccagtcaccatctccagatccacatccaaaaaacagtttctcctacagctgagctaccttaacaaggagtacacaaccatgatttttatacaaaagacacagcgaggggaagccattgtgcgctcagaacactctacaaattttcctccctagtgttttaccaaaactggtatatatttcagatactgaaatatttacaacctacgttattatgctaagaattctaagttagaagttagaatgataattgtctcttttttttccttttttttttttttttttttgatactgagtctcactgttgttgcctgggctggagttcaatggtgcaatctcggctcactgcaacctctgcatcccaggttgcagcaattctcctgcctcaaccccccaagtagttgagattacaggcgcctgccacgatgcccggctaatttctgtatttttaatagagacggggtttcaccatgttggcctggctggtctcaaactcctgacctcaggtgatccaaccgcctcagcctcccaaagtgctggaattacaggcaggagccactgcacctggccaattatcctcttttcatagatggataaactaacctaggcctttgaaaataaacccttatctgagagtgaaaagataagccatagatttggagagtttgcttgcaaatcaaatatttggaaaaggacttttattacaaatatacaaattaccttacaattgaacaacaaaaccacacaatttaattttaaaatgggcaaagacctgaatagaaagtgcatctaacaataagtataaaaagtgaccaactggattttcattaggtaaatgtatgtttaatattgaaaaaatcctagtaacctaatagaatgggtaaaatacacaatatagacaataccaaatgttgacgaggaagttgaaaaacaggaattttcacccattgctcctgagaatgctgaattggcacatagacaactacagttaataatttattgtgtatttcaaattagctagaagataacatttagaatgttcttaccacaaagaagtagtcaatgattgagatgaaggttgaaggttgtcccagttatccagatatgcacataattttctttttttcgaaatatcacatgtaccacataaaggttttgaactattatgcatctatttaaattacacattaaaaaacaccagtggaagggaatccagctaattgcagattgccattggatgggacgttctgtataatctgtaaactaatcagaatctgtgtttttctaaaggacattaggaatcgttatactagtttctaaagataagccttgcaagtttaattattttcctaatgggtggcgattttgaacattgaagaaatgttagtatttgtttctggttaagttttcttcttctagtctcaggagaaaaggtttgcagggaggaatctgagactatctttcaagtctcaacttcaatgtgattacctcagtaaatattttctgatacccctgagtagggtaagtctcatatatgtccaataaactaaaagtagaattttaagcgcccaagctgactgaatggaaccttcctcttcaccaaggagttccagagacttgaaaacctagttcaggccacattagaaacagatcagaaatgcctcattataccctcctcactttggaattcaagcacaactgaccagcattttcatgaaaacagaggactcaaggctcagaaaacggattccgtgtagcaataagataccaaattctaacctgactcgagaatagcgtcatgtgacacagagcaggccttgaaaggaatcgaaggcttttaccctaaaatatatttctttgacatatttttaaatcgccctgcacagttatcctttgtgagagagatttacattctgtagagaatctccttccctttccaggtctttcgttatactgaggagattagctggaagtctagcatctcttaaaggtcttagtagaaaaacatttgccatctatttcctctaagcgtggccacataagagacttcatctgcataatatgaattttgttctccaaaacctgttatcttaacccagacactttttactactgatttctggtctttagataaaaacttaagtctttcaatgaattgccaattgaaaaatcatttaattcacctgtaagcggtaattatctccccacactgcctcacttctagctgttttgtctttatgaaacaaatcaacagatatctcacatgtatcaattgatgttattaaatttaacctgcaatcaaaccactttgggcacatgttatcaggatcctctggggctgcgtcacagggcatggaccccacatttggctcagaataaatctctctaagtattttccaaagttggctttttatcgatagaatctactctgtggtctctgttacattcaaaagcatgatagtaataaagtattagttattaaaaataagcacatgttggcagtttcttacgaagttacgcatagactaactatgggatcaagtgtaaattttcaaagtatttatgcagttatttcaaaatgtatgttccacagatacttctatcagatcctttatattagataattatttgttttatgactttttttgtagatgatcatgccgtatcttttctaggcctttattgtagaaaattgtgtgaaaccagtcagggctacatttgaaattcattgtcacagtggctgcctgaattgcagtgggtttcctctgcagccaccagacacccagattcctccagtgacaccttaattttgtttcctgcttggcattgggccttaaattgtgtgttccagagagactctgtctttcatctcccccaggtcatcccagagccacatggacctgatgattgtcaatgtggtgggaagggttgcactgaacgggcactctctgtccttctgagggagccacactccaggcagacatggcagtcctggctcaggacgtgtccttccaagtatccctgcccctcctgcaggtgtgatgctgatccatgcatcttcctcccattcctgggtagagggtctccttgttctttccccaatcttctcccagcagccactatgtcttcccactgatgtcttcagcttcctcttttctgcccttcccagcagatgagtctgttattcctgagggaagagagaggaggtgggagatgaggctgttattcctgaaagaatggacagagctttggagcttttctttcttctaccccagtttctacgagttcctccagtgcctgtaacacagagctgtcagtggctttgcccctgcatgttaattctttggtcatgtagtggtggtgagggagctgggtctggatgcatttcagccacagctgctgttccgtttcccacacagaaccatctcgggaggaagagggtggagatttttgtgatgtgtcctcaatcttgggaggaaaggtttcaatagcaataggagtctctcagttttaagtcctgtggaaatttaaataataacttcttcattatacttaattttaagcaatcgggtaaatatatctaatttaatcttgcattaacttatatgacatttgctggcctctgcctcagataaaattatattcttttcctgtttatccttacaagtcactgatttgattttcacaagaggtaagttctctcatttgccctatacatcaataaactcatgtattaaataaaatgtgctaatttgtagctcagtaaggctagttgttgtaaaaataatacttttttattggatgactacatctccaggcggagtagaagatacatttgtaatactcagaaactggaaataacacaaatgttaaggagatttataaataaatgataggggtgtactcattaactggaatactgttcctcgttagaatcaacacctttatacacaatcaaattactgactcacaagtaattattctgagcaagaagccacacaaatgaaatggaaactaaaagatttcactttaacaaaatattgaaaaatagatctgaattaacaaagatgagaggttgactgagtatagtgagagagaaatgacgggaggcaggaatgagaggaacacagggaagcagggaagcttttaactgtaatcatcattatcttgattgttattttggatacacaggtgagcacatgtgaaattacattttttttctttggagacatggtcttgctttgtcatccaggctggagctcagtggtgagatcacagctctctgcagcctcagaccctgggtctccaatcctcctccctctgccctatgtagctgggactacagttgtgcaccaccatgctcggcttcagtgtgtattcaactgcacactttaattatgcaatatttattatatagcaataatgcctcaataagggtattgcaaataagtgaatatataatttgttagataaagactgatggaaagatagacacgaacatgagagatgtatgacacttaagaaaataaaactgtgggaaacatgctgttctttacaattgttaggtaatcacaaaagagcatacacatcacaccatgttcccattacagagaaatggttctgtaaacctcactaggtgcaacccctgtgtgctgggcttggttcagggagaagtcaggtccagtggtgagaagcacaggcccagatgcccaggtcactctgaccaaatgtgagctctggggacactgtacaacccatctgtgcttctgctggtaatttctcatttgtaacatggaaataacattgatactacataccatggtttctctgcatgtgtaaaaataaaagattattggtgtgaacttcaaaaatatgcagtttatgtagatctattgtacctcaataaaacttttaaaataaaaattacaaaattataagatttataggttttaagggtttaccacagaacaaacttacaataagtaaccacaattcccaaatgctatcaatatcacaaatctcccccaggacgctctcacatgctgtgagccccactctctcctcaggcctctcaccccagagcttactatatagtaggagacatgcaaatagagccctccctctgctgatgaaaaccagcccagccctgaccctgcagctctgggagaggagccccagccctgggattttcagatgttttcatttggtgatcaggactgaacacagaggactcaccatggagtcatggctgagctgggtttttcttgccgctattttaaaaggtaattcattgagaactattgaaattgagtgtgagcggataagagtgagagaaacagtggatacgtgtggcagtttctgaccagggtttctttttgtttgcaggtgtccagtgtgaggtgcagctggtggagtctgggggaggcttggtacagcctggggggtccctgagactctcctgtgcagcctctggattcaccttcagttactactacatgagcggggtccgccaggctcccgggaaggggctggaatgggtaggtttcattagaaacaaagctaatggtgggacaacagaatagaccacgtctgtgaaaggcagattcacaatctcaagagatgattccaaaagcatcacctatctgcaaatgaagagcctgaaaaccgaggacacggccgtgtattactgttccagagacacagtgaggggaggtcagtgtgagcccggacacaaacctccctgcagggccgcgcggggccaccagggggcgctagggacccactgagggcgggacaggagcaggtgccgggagaggtttcctttctcctcagctggaaaagtcaggtttgtgtttgccggactctggagctttctaggctgtgacgttttattacttgtgtttattatgaatttattatcgttagtatttaaattttagtaatttaaaaattatatatatatgtttacactttaatgaaataagcattcctatttgcaccgattcttccagagttttattaacatttgttgacgtcagcagctacgaagctatagggacataaatttataaccatagaaagatgtataggccaggcgcggtggctcacgcatgtaatcccagcacgttggaagccataggtgggctgatcacttgaggccaggagttcgagaccagcctgggcaaaatagtgaaactccatctctactaaaaatgcaaaaatcagctgtgcgtattggcatgtgcctttaatcccagctactcggtaggctgaagcaggagaatcacttgaacacggaaggcagagattgcagtgagctaaatggcgccactgcactccagcctgggtgacagagcaagattcgatctcaaaaaaacaacaaaaaacaaaaacaaaacaaagaaagaaaaaatatataaatacaaagacatatgcatatatgtgtaggaattcataataaacattacaataaagtaattctaaaaatatgtcctaaagaatcaaacttaatgatgagctaaatgtaaattatttgagtatttcacaattgattttggttatttttaattgtttacatcaattgatttatatttgttcatttaactactgttaaataatggttatttcaaatgtggttgtcacaataaataataagaatttgaattgataaatgataattatcttaatcatttcttaattatcttagttatcccatatggtattcacaaatcataacattgcttcttaccttgtaaatataaacaaccataattcgtgaatttaaaataaaattttttattttaattttttaaaatttatcccagatcattatctttttcttcagttccagctctcatttgatggtctcaagggcccatctgcacccctgtctcctgaaggcttctgggagtggctgtgggacaggcagaagcaggagcccatgtgagtccacacgacctggagcctccctctccttggattaggccatctcctcgggatcacagggctcttcattatcctcaccccgctgttgtaccaaacaagcaacatcacacttcaattcatcacgctttgctttaattttctaaatcatcgtgaaggtgataatgttaacagtaaatgtatcactaacaaataggataagcccttttccatgggacagggtttcttacaaggacttgacatgtattatgtattttccatttatttatagatgagatactaatatctccatattggagacaattcctttaagtcatttcttaaaattaatttttcctaggactccaaacaaatccatgatatagttgaaaatttcaggtgtaagagttgggccaacattgagactatattaacatttataacatgtgcttgcaaatattgttatttttctgtcggctgtccccagttatggtttgatacaaaatgttagtaatttatcctaataaaacagtttacaatattatatcaatagtttattaactttgtataactaataatataaaatgttcaacatattttagccatattttacttatttgtgaaatgtgtgcttattagtttttcgttttaagatgtcacctttatcttttttatttctgggattttattctagtagatataactaaatgtctttaaataattattgtaataatcacatttatattttctatttgaattttcatatgcatgttattaagattttaatttcaataaaaatattttcctccaattgtctattttctgtttttatgagataacatatacaaaaatgcatagctcttcaatgtacagtttgagggtttctggcaaatgtgcacgtttgtctccagcacctaagttagggtgaggagcaggtccatctccacaagtgtcctctcagtgtttccagtcagctctcacataaggatttttttttaatttcaacttttaatttagatacagaggggacgtgtgtggacttgtcacacgggattattgagtgatgctgaggtttggaatccagattccatcaccccctccctccactctccagcagtccacggtgtctattgttcttctatttatgtccatgtgtgctcaatgctgagctcccacataggagaatatgtggtattcggttttctgttcctgcatttatttgtttatgattaagaccaacagctccattaattttgcggcaagggacatgatttcattctttttcatggctgtgtagtattatatagtgtagatgtaccatattttgtatattcagtctaccagtgatgtgcatctgggttaaactacgtctttgccactgtgactagcacagccatgaatacgcatgtgtaggtgtctctttggtagaattatttatttactttttagtgtataccctgtagtggaattgctgggtaaaatgatatctctgttttaagttctttgagaaatctccagtctgctttccaaagtggcaagactaatttatattctcatcaacagtgtataagtgttctcttttctccaaagtcccacaagcatcctttgtttttcgacttttttgtgataccattctgagtggtgtgttgctgctcacctacaatcatctcatatttgataaggctgatgaaaagaagcaatgaggaaaggactccctgttcaataaatgatactgggacaacgggctagccatatgatgaagattgaagctgaccctgtactttcaacatatataaaattaactcaaaattgattaaagccttaaatgtaggacctcaaaccataaaactccttgaagacacccttgaaaacactcttatcgacactagttttgacaaaaaatttttggctaagtatccaaggccagttgcaacaaaaagaaaaatagacaagtgggacctaattagttaaggagtttctgcacagtaagacaaacaaacaaacaaacaacaaacaaaactatcagcagtgtaagcagacaatctacagaatgtgagaagatattcacaagcattgcatcccacaaagccctagtatccagagtctgtagataaacaaatcaaaaagaaccaaaaaaaaaaaaaccctttaaaaattggctgatatggtttgctgtgtccccacccaaatttcaacttgaattgtatctcccagaattcccatgtgttgtgagagggacccagggggaggtaattgaatcatgggggctggtatttcccgtgctattctcttgatagtgaataagtctcatgagatctcatgggcttatcagggatttccgcttttgcttcttcctcattttctcttgccacccaccaggtaaggagtgcctttttcctcccgccgtgtttctgaggcctcccaagccatgtggaatgtaagtccaatcaaacttctttttcctcccagttttggatatgtctctatcagcagtttcaaaatggactagtacataggcaaacgacacagacacttctcaaaagaatacatgcaagtgcccagcaaatatattgtaaaaatgtttaacatcactaatcatcagagaaatgcaagtagaaaaatgttctgatttctgtcactataggaggtccctttttcttgtttagaacttcatatacatggaataaaatattatagatcatttttgtaaggggcaacttttactatttgtgaggttcattcatgtaatagcatttatcaaggttttgtcatcatatgtataaatatgtatgtactcatacacatatagatatttcatatctaaatcaattacattaataaatgacagattattaaataaataaatctgtttattaagtaaataagtgacaatatgtatatctattttcctgttgatgggatttaaatttgtttccaaaataaacatcataaacaaaactattataagtatctttgtacaagttcttctgtttatattcacacattttattgataaaatatgtagatatataggtatgcattataacttttcagctttatggagctatcactgacaaataaaattgtatatatttagggtacaccacttgatgtattgatgtacctggggagatgctcatcatgatcaaggtaatcggcatgcctgtcctctcagagagttatcattttatgtctttaatttactgtgtgtgtgtgataaaaacacctaatatctactcttctggcaaaagatacctttataatacaatattcattagtatagtcacattgctttacgtttcatctccagaactatttcaacctgtgttttagtccattctcaccctaatgtaaggaactacctgagactgggaaatttacgaagaaaagtggtttagttgactcgcggttctgcaggcttaacaggaagcattattgggaggcatcaggaaacttacagacatcatggaaagtgaaggggaagcaaggaccttcttcacatgctggcaggggagagagagagaaagagcaaggcgagatgagccacacttttaaaccatgagaccttgtgagatcttgcaagaatcacaaaggggaaggtcgcccccattattcaatctctccccatcagacccctcctacaacacttggggattaaaatttaacatgagatttgggtgaaaatgcagagacaaaccatatcattccacccctggtccatgacagatctcatgtccttctcacattgcaaaatatatttatcccttctcaacggtctcccaatcttaactcatttcagcataatcataaaaatctatagtctaaagtctcctctgacaaggtcagtttcttccccctataaatctgtaaaattaaaaacaagttagttatttccaagatacaactggggtgcatgtactaggtaaatgctcccaatccaaataggagaaattggccacagaaaatggattacaggtcccatgcaagtccaaacaccagcagggcagtcattaaatgttaaagctccaaagtaatttttcttttaccccatgtctcacatgcaggacacactgatacaagagatggtctcccaaggccttgggaagctccacccttgtggctctgtagggtccagcgcccatggctgctttcataagctggcattgagttcctgtggcttttctaggcacaccgtgcaagctgttggtggttctaccattctggggtctagaggatggtggccctcttctcacagatccactagacagtgcctcaatggggactctgtgtgggggatccaacatcacattttccttctacactggcctagtagaggtactccattagggctcagccccttcatcagacttctgcctgaatatccaggcattttcatatatcatctgaaatctaggaggaggttcccaaacctcagttcttgccttatgtgcaccaacagactcaacaccatgtggaagcaaccaaagcttagggcttgcaccctctgaagcaatggtctgagctggaacttggtcccttctagctatggctggcacgagacagacaggggtgtaaggtgccatgtctcaaggctgtacagagcagtgaggtactgggcctggaccatgaaatcatctttctctcctgggcttctgggcctgtgatgggaggggctgccacaaagatctctgaaatgccctgggaacattttccccattgggctcctcattacttattcaaatttctgcagccagcttgaatttctccccaggacatgggttcttcttgtctaccagatggtcaggctgcaatttttttccaaccttttatgctctgcttcccttttaaatatgagtttcaatttcagaccatcttttcatgaatgcataggacttatgttttcagaaacagccagggaaaatcttgaatgctttgctggttagaaatttattctgccagataccctaaatcatctctccctagttcaacatagcacagatctctagggcaggggcaaaatgccgctagtctttttgctaaagcatagcaagtgtgagcttcactccaattcacaagaagttcttcatcttcatctgagaccacctcagcctggactttattgtccatatcactatcagcactttggtcaaaaccagtcagtaagcctctaggaaatttcacttttccacgacttcctgtcttcttgtgagccttctaggctttcccaacatctgtccattacaaagtcacttccccattttcaggtatcgtaatagcagtaccgcactcctggtgcaaattttctgtattaatccattttcccactgctataaagaattacttgagactgggtaatttatgaagaaaagagggttagttggcttacagttctgcaggctaaacaggaagtgttactgggaggcatcaggacacacaatgatggcagaaggtgaaggggaagcaagaacattcttcacatggtggcaggagaaaaacagcaagtgagcggggaggtgccacacttttaaaccatcagatctcttgagaattttatcatgagaacagcaaagaggaagatcacctcatgattcaatcactttatattaggccctttcttcaacatgtagggattacaatttgacatgagatttgagggggaacgcagggccaaaacacatcaacctgcataaccgaaatttttaccctttgacctacatcgcccaatattttcctcctctcagggcctgggagctactattctactctgcttccaagagctgaaatattttacattctacatataaatgagatcatgcagcatttgtctttctgtgtctggcttattctaattagcataatgttctctatgatgctgaaaatgtaagaatttccttcttttaaaggctgaataatattcaattttatgtatgtatatgccacattttatctgttcattcataaatggacattgacttattttccatatctaggctattatgaataacctcacaatgagcatatttgatacactcacttcattttctctagatgtacacttagaagtgggtataccctatgttcaattcattcagtaatcttaatgttgtttttataatggctgtactaatttacattttgttccaaaccatacatggatacctttgtaccaaattttcaggtctacgtttaagtgttaaatccatttcttgttgatttctgtgtattttgtgagggaaggtccttttttttttttccttagagttagaatctcgctctgtcacccaggctggagtgcaatggcatgatctcggggcactgcaacctctgcctcccgggtttaagcgattcttctgcctcaggctcccgagtagctgggattacaggtgtgcatcagcacgcctggctaatttttgtatttttagtagagacagggtttcaccatattagccagctggtctcaaactcttgacctcgtgatccacctgcctcaggctcccaaagtgttgggattacaggtgtgagccatcacgcccaaccagtccatttaatttcttctacatatggatacccagttttcacaccacttgctgaagagactgtcctttgtctattgtgtgttcttggcaacttgtcaaagatcagtttattgagaagaagtgggttgattatcaggtgtctataatgttccattagagtatatgtctgtttaaatgtcagcattatactgttttgatttagatagatttgattttgaaattatagaatatgatatattcagctttgttatactttccccaaaattactttggctattggaaggcttttgtatttgtatataaattggagcattttaaaaatatttttgtaaaaacatgccatggagattatttactttattgacaaataatagatatacctaatttatgggagcatgcaatatatttatacatttacaaatatgtgaagatcagatcaggattggtatatctatcacgttaaacaggtatattttctttatgctaggcacattggaatgactctcttctagttattttaacgtgtacattagattatttttaactatagtcaccttactgatctatcagacatttaggttttatttctcctatataactatgtatctgaattcagtaatcaacctctctttatccccttctctcttgtatccacccaggcttctggtaaccaacaatctactcttcgtcttcaggaaatccaattttttagttttgacataaaagtaagaagatgccatatttgtctttctttgcttggcttatttaacttaacataacggcttccagttccattcatattgttgcaaatgacaagatatcgtattttatggctgaataatattctattgcgtacatagattacattttctctatccatttgcccacctgcagacactgaggtgctttcatatctgggctattgtgagtagagctgcaaagaacatggagtgcacatgcctttatgaggcggtgattttatcttcttcagaacatacccagaagaggatttgccacgtcatcaggtatttctatttttaatttattttggagtcttcatattactttgtacaatagtggaaatgcaataggaataaccattataaaaagcagtttcagttttgaggtatgatccaaaaacaaataatgtttgaccatgattctcactgggagtctctaatgagcctggtggaaatgcaggaagttttctaaccttgttaagaaaattatgactttgcacatttttctttttaaggctggtaattggcgtgattccagatgcatactgttggcgggtttcagaatgatacagaaaatcattatgagaaggcaagaaaaagaatgatagagagagagagagggagagagagagagagtcaggccaacaatgagaaaaaataaatttcacaagaggagaaagtgctggatatcagtgttgggttttggtcatagacacatctgtactgagtaagaaactatgaagtcaagggaggagtctagaatttgttcaagtgaagcatcagcatattctctgaggcacatattgtcaccccatcataagggtgatgaatttttgaatgccatgaaatgtgagttcacagtaagtaatcatgtttccatgaaatttagttaaaatgccaagggtgtgttcagatcactcatgcacaaatacacaaaatttgcctttgcatttatagctatctagagaaaaagtgcattgagatgtcagcaggttacagagatctgtttaagtttgggatcccatgggagagtgcctcttagtgaaggttggtctattaattcagtaagtaaaaattctctctatgggagtagcttctaattgtgtggaaatttcaattccttattgagtttttaaaaaatatctcagggactgactccatggagttttactgctgtattgataaaaattatcatcaaagaccaaaggtagataaaaccacaaagatggggagaaaccagagcagaaaagctgaaaattctaaaaatcagagcacctcttctcctccaaaggaacacagctcctcgccagcaacagaacaaagctggacagagaatgactttgacaaattgagagaagaaggcttcagacaattggcaataacaaactactctgagctaaaggaggatgttcaaacccattgcaaagaagctaacaaccttgaaaaaagattagacaaatagctaactaaaagaaacagcatagagaagaccttaaataacctgatggagcttaaaaccatggcacgagaaatacatgatacatgaacaagcttcagtagatgattagatcaactggaagaaaggttaccagtgattgaagatcaaatgaatgaaatgaagtgagaagagaagtttagagaaaaaagagtaaaaacaaatgaacaaagcctccaagaaatatgggagtatgtgaaaagaccaaatctatgtctgatttgtgtacttgaaagtgacggggagaatagaaccaagttggaaaacactcttcaggatattatccaggataacttccccaacctagcaagggaggccaacattcaaattcaagaaatacagagaacaccacaaagatactcctcgagaagagcaactacaagacacataattgtcagattcaccaaagttgaaatgaaggaaaaaatgttaagtgcaggcagagagaaatgtcgggttacccacaaagggaagcccatcagactaaaagtggatctctcagcagaaactctacaaaccagaagagagtgggggtcaatattcaacattcttaaagaaaagagttttcaaaccagaatttcatatccagccaaactaagcttcataagtgaaggagaaataaaatcctttacagacaaacaaatgctgatagattttgtcaccaccaggcctgccttacaagagctcctgaaggaagcactaaacatggaaaggaacagccagtaccagccactgcaaaaacatgccaaattgtaaagaccatcgatgctaggaagaaactgcatcaactaacgagcaaaataaccaactaacatcataatgacaggatcaaattcacagataacaatattaaccttaaatgtaaatgggctaaatgctccaattaaaagacacagactggcaaattggataaagagtcaagacccatcagtgtgctgtattcaggagacccatctgacatgcagagacacacataggctcaaaataaagggatggaggaagatctaccaagcaaatggaaagcaaacaaacaaaaaaagcaggggttgcaattccagtctctgataaaacagactttaaaccaacaaatatcagaagagacaaagaaggccattacataatggtaaagggatcaattcaacaagaagagctattttaaatacatatgcacccaatacaggagcacccagattcataaagcaagtccttagagacctacaaagagacttagactcccacacaataataatgggagactttaacaccgcactgtcaacattagacagatcaacgagacagaaagttaaaaaggatatccaggaattgaacgcagctctgcaccaagaggacctaatagacatctacagaactctccaccccaaatcaacagaatatacattcttccaaacaccgcattgcacttattccaaaattgaccacatagttggaagtaaaacactcctcagcaaatgtaaaagaacacaaattataacaaactgtctctcagaccacagtgcaatcaaactagaactcaggattaagaaactcactcaaaactgctcaactacatggaaactgaacaatctgctcctgaatgactactgggtacataatgaaatgaaggcagaaataaagatgttctttgaaaccaatgagaacaaagacacaacataccagaatgtctgggacatatttaaagcaatgtttaaagggaaatgtatagcactaaatgcccacaagagaaagcaggaaatatctaaaattgaaactaacatcacaattaaaagagctagagaagcaagtgcaaacacattcaaaagctagcagaacacaaggaattactaagatcagagcagaactgaaggagatagagacacaaaaaacccttcaaaaaaatcaatgaatccaggagctggtctttggaaaagatcaacaaaattgatagaccactagcaagactaataaagaagaaagagagaagaatcaaatagatgcaataaaaaatgataaaggggatatcaccaccgatcccacagaaatacaaactaccatcacagaatactataaacacctctacgcaaataaactagaaaatttagatgaaatggataaattcctggacacatacaccctcctaagaccaaatcaggaagaagttgaatccctgaatagaccaataacaggctctgaaattgagacaataattaatagcctaccaaacaaaaaaagtccaggaccagacggattcacagccaaactctaccaaaggtacaaagaggagctggtaccattccttttgaaagcattccaatcaacagaaaaagagggaatcctccctaactcatttcatgaggccagcctcatcctgataccaaagcctggcagagacacaacaacaaaaaaagagaattttagaccaatatccctgatgaacatcgatgcaacaatcctcaataaaatactggcaaaccaaatccagcagcacatcaaaaagcttatccaccacaatcaagtttgtttcatccctaggatgcaaggctgattcaacatatgcaaatcaataatcgtaatccatcatataaacagaaccaaagatcacaatcacatgattatctcaatagatgcagaaaaggccttcgacaaaattcaacagcccttcatgctaaacactctcaataaactgggtattgatgggacttatctcaaaataattagagctttttatgacaaacccacagccaatatcatactgaatgggcaaaaaccggaagcattccctttgaaaactgtcacaagacagggatgccctctctcaccactcctattcaacatagtgttggaagtatggccagggaaatcaggcaggagaaagaaataaagggtattcaattaggaaaagaggaagtcaaactgtccgtgtttgcagatgacaaggttgtatatttagaaaaccccatagtgtcagcccaaaatctccttaagctgataagcaagtttagcgaagtctcaggatacaaaatcagtatgcaaaaatcacagacattcctatacaccaataacagacagagagtcaaatcatgagtgaactcccattcacaattgcttcaaaggggataaaatacctaggaatccaacttacaagggacgtgaaggacctcttcaaggagaactacaaaccactgctcaatgaaataaaagaggatacaaacaaatggaagaacattccatgctcatggataggaaaaatcaatatcatgaaaatggccatactgcccaaggtaatttatagattcaatgccatccccatcaagctaccaatgacttttcttcacagaattgtaaaaaactactttaaagttcatatggaaccaaaaaagagaccacattgccaagacaatgctaagccaaaagaacaaagctggaggcatcacgctacctcacttcaaactatactacaaggctacagtaatcaaaacagcatggtactggtaccactacagagatatagatcaatggagcagaacagagccctcagaaataataccacacatctacaaccatctgatctttgacaaacctgacaaaacaagaaatggggaaaggattccctatttaataaatggtactgggaaaactggctagccatatgtagaaagcttaaactggatcccttccttacaccttatacaaaaattaattcaagatggattaaagacttaaatgttagatctaaaaccataaaaaccctagaagaaaacctaggcaataccattcaggacataggcttgggcaaggacttcatgactaaaacaccaaaagcaatggcaacaaaagccaaaatggagaaatgggatctaattaaactaaagagcttctgcacagcaaaagaaactaccatcagagtgaacaggcagcctacagaatgggagaaaatttttacaatctacccatctgacaaagggttaatatccagaatctacaaaaaacttaaacaaatttacaagaaaaaatcaaacaaccccatcaaaaagtgggtgaaagatatgaacagacacttctcaaaagaagacatttatgcagccaacagacacatgtaaaaatgctcatcatcactgaccatcagagaaatgcaaatcaaaaccacaatgagatgccatctcacaccagttagaatggtgatcattaaaaagtcaggaaacaacaggtgctggagaggatgtggagaaataggaacacttttacactgttggtgggactgtaaactagttcaaccattgtggaagacagtatggcgattcctcaaggatctagaacaagaaataacatttgacccagccatctcactattgggtatatacccataggattataaatcatgctgctgtaaagacacatgcacacatatgtttattgtagcactattcacaatagcaaagacttggaaccaacccaaatgtccatcaatgatagactggatttagaaaatgtggcacatatacaccatggaatactatgcagccataaaaaatgatgagttcatgtcctttgtagggacatggatgaagctggaaaccatcattctgagcaaactatcacaaggacagaaaaccaaacactgcatgttctcactcataagtgggaattgaacaatgaaaacacttggacacaggatggggaacatcacacactgggtcctgtcatggggtgggggtagtggggagggataccattaggatatatgcctaatgtaaatgaggagttaatgggtgcagcacaccaacatggcacatgtatacatatgtaaaaatcctgcacgttgtgcacatgtaccctagaacttaaaagtataataaaaagattaatatgattccttccagtgtttcaagaaaactttttctccaaaattttttccagcgtataaatttttctggctgaatattataagaggctgttgctaaaaagacatactagaatggcagctttaatctgttcatgataggagtgagcataatacatgatctctttgagtgttctgcctcatccaaatgcagtgtggcaaaggctagtattggaggtaaaacctctaaatgaattttttccagctaccaagtcataggacaatagcagatacgtccttgaggtagaggaccataatgccacagtgttagtagcagtacatttgtccaagggagttccagggtttattaaaattatgataattttaatgtaagaataccattcttttaaacttatgtggaagattgtaggaggttttcacaatgttgtcctttactatcagccatgcctcacataatcactttataatactttcatgggtgttcttcactcagttcatgcaaaccctggcagtttacaggctaaaaacacaaaatacagaagcttttaatcaactgaaagagctgtagccttttctcaaggaattatttcaagacacggagaacacagatggatgataaataaaatacattcacatccccttaagggtagaaattgaggaaaatttacccaaaggtgtccaaagggccctgtgacttggtttctgtctaagtcccagtgttagggttcttccaggattttgtggctagctcgtcactcctcatcaagaattaacctctgctgtttcctcaaagtgtttatttaatctgataaccagtttgtctataaattatagagttgaaatgcaacaaatttcatttgaaataatctggcacaaattatctaagcaaagtcgataatgatgttttttcattcatttgtatttaagatcatcagctaagcgttgatatttttgataacacccatgtctctctcagcagttttgtcttctgaggatatgatctggcgtggcagttctcttagcttcagtgttacctctttttgccttgacttccacctttatatttgcccggaatctgggatataggagtgcctctaagagtcccctaacttgcccattttggtgagtgttctggaacctatgagatgctcttttgtttacaaagcaccccaaagccatgtactgtgccaaaaggtgtttatttcctagtttgacaaattagaaagttctaataaatacaatcacttctgccatctgggctgattttatatcagatagaggactgtgttctaaaggaaatcttacattagtaagagcaattttagtcattaacctagagttgtactattgaggtgcaagtcataagaaataatattaggtcgaggttctcagtgggagtgtctaaatgtcttgtgtgtacagggtctcctctattaacatgaagcatttttgagcacagtcagtttccagctatgcttctccctgtctcactatcaccacaaactaactatgaccccacctggaacctaggttaatttccaaataagtcattctttaatctttgtgcctctagattattatgtgagtcaatttcagtagaaacttaaaaagaacatttgaacggactaaacaacacagaaaatcactaataaaatgcaaagcctagatgtgagaggctccaggcctggataatggaacacttcatgtatgcaggtaatttcttttcccaattcaacactgatacacccagcatatcagcttcatgccccattttactcctattatgtagagatatggcaatgacattctcaaggtccacacacatatatgaaaattggtaggactaggggaggagatgagtctgcacttctcctctgaaggaccaggaaagcctggacagaccatctccccggcctccatgactgcacctcctgcccacatggacactcacccctgataggataagaggattccattgatgaggctgagtattttatgatataagttactagagagtgacattgaggtttcaaaaactaatatttataacctaaatttaatttcccccaaattgttacctctttcttcagtgaaaaattgcttgccgtgattgagatttaggtagattccaaatgttcacaactaagcttccaagagcgtattgggagcaaaaactgaatgagggtagagaaacccatcatcatgtattcaacactaaattcaagtggactcagcactgcctttgatcactgctgcttctctgcagagttcaggtttctacttctcacgattccaacatagactctctctctcccaaatgtttggcctccacttgctgtaaggtcgcactctgttcttagtttgttctctgaaccattttatgagggtggtgatgagccatttaatggaaattttatatcatttcagctgaatcccatgggggatcatgaattattcttctggttatagtaatggatttttcttggtgtgttcattaccagtaatattcaaagtcatttcatttaaatctttgatgcttcattttttgttgctatgacattctttcttctattgaatcttcccactagcattataacatgatctagtatccaggctcagttgtcatcaataataaccacgtatgtcaaaacctatgtcttctttccacaggagacatatttttctcttttcaggggatgaacacacactgctgagtgacccccactcacaagtacatatacacaattatgagatttttatttatttgactaataagatgtatcattctcccttaaaattcttcaacccccagaagcccgtgacaaactcttctgcatctgttcataccataaactcagaaaacaaaccacatggtgagtaaaagctcacacggttctggatatggggtccatctcttcccctgcaatgtcctgcagcacctcagaccacctgtcctggttctatcaaggaagtttacctccagcacagtaaagaaaacaattgaaggaggagagaacctgcagatgatagacaatattcaaaactattcatatgacaagggattactatcaagcacataaactcaactgaactgcaaataacaatatgattaataatgggcgaataacatggataaacgtctctcagaggaagacatgcaaaggatagatagatagatcgatagggatatatacatacatatattgctagaaataactaatatcaggaaaatgcaaattcacaatgagctatctttccttaatctttgctggaaagtctgttagcagaaagacaacataaggaaaacaaaagctggccaggcttcatggaaatgaacacttttatagaccacttgtggaaatgtaaattagtacagccatcatgggaaaaaaaagacaactaccatataaatcagcaatgcaactgctgagtgtgtgtgtgtatatatatatatatatatatatatatatatatatatatatatataaaattaaaagaaaaaactaatattgaagagatacctgtcgacccatatttattgcagccctaaacacaattacgatatgaaattaatgtatgtgtccatcaaaacgtgaatgggtaaataaaacggggtatatttacacaatggaatattattcagccttaaaaatgaaattccgctgtttgaaacaacatggatgtaactgggaaccgttgtgttgagtgaaacaagccagacacagaaaaaaaaatacctcattttctcaatgttatgtagaagtttaagaaagttcatcttctagaaggaaatagtagagtagtggttatgaaatatcagaaatgggtggagaccgagagataagaagtggtttgttaacaaatgcacaattacaggtagacaggtgggatacgctctagtgccctacagtgcagaagggtgactacagttaacaatatattgtacactttatgtttacaagtagccagaagagagaattttgtatgctaccaagcaaagaaatgttaatgtctgagctgatgaattagctcgttgttctgatttggtcaaaccacattgcacagatgtattgaaatatcacactgtaccccataaatataaacaatcattatctgccaacttaaaaaatcctttaattaaaaaagattttatttgcatacattacaaatgattcaacacagagccaggaaaatataacatttttatttgaaatagttaaattcctaacaaaatagttacattcttttgcaccaaactgtgtatttgatcatggtaagtatagacagacttatgcaaagaataatatattttaaacttagacttctacttaatactataaataaaaataattttagaacagctaagtaaaaggaataaagttgaggaaatgtgtgtgtggtgtgtgatgtgtgagctttttcttgtaaccacactgtccatggtggatgtgtggtgtgtgtgtctgtgtctgtttgtgtttcctctgctaggggttctctgtgattctaggatctgtagttcagtgtgtttcaaaaaattgggaacattcttagccattactttttcaaatactttctctttatctgcaatttctccttttcagaattaaaatatacatatactacactttttgatattaatgtttagtttcttcagtctctgttcctttgcaatttacattgtgaattttctagagacaatttaagtgcatggtttcatttaaaagctgagccagctctactgaggggtatgcccaaagtttgctcaatgtttatactgcattgcttttggtttcttatgcacttccatttgattctttcttaatatttatatctctcagttccctatctagtcctgcattatgtccacagtttcttgaagagattctcacatatgaattacagttactttacatatcttgtttaatcagatatttctaatatctgtatcatttacaaatctcattctgaacatttgtttattgtgactttagtatttctcattaatataggtaataattgttgttgataaccagacatgttgggtcagacagttgatattatcttattatttcattttatccattttctgcctgtatttgaccacactttatctttgccaggcctttaatgtggaaatgtctgaatcttctcagagctacatttgacatttacttttgcagtggacgtcagagttgaagtctgttcttctgtgcccgacagagacttcagatcctccagtgataccttgtttttctttcctgcttggctttgtctcttcacctgttccctcctccagagaatctccttcagttccttcaggggggttaagatgttatattcaactgacaattgtaaaattgtcatagaataaagggatatttagaataaagggatattttctgacctttcatgggtccatattgtgatcctgagtctgggtgtgacctttccattgtttctgaactccctccagatgagatgttggtctgtgtgttcttgctgttttccctgggtgagagtcctcttgttttccccagttgttccctcccacagctccaatgttctcttttggtgttatcatcttccagatttgctgacctgacccatagattaaggctctgattcagtatgaaagggggaggtacttctcaatggaacttaagtaaagacctctttttccatctcattttctaagggattgtcccagtgcccctaagatcctggttttggtggcttgcccctgcagagtaatttcttagttctgcaatggggataaaggaggtgagtctgaatgcatttcaaagtgtgggttctttttctctcacagacagacacattggcacggaaagatttttgtaactctccacattattgggaaaactgattcaagaggataggaaagctcttcagtatgtggtccctgagaaattcatacaacaccttttaccacacttgacttcaagcaacccaatatatatatgtgtgtttttctcttgtagtagcctacattttacatgccagactctgcccagttcagctcatatcctggccttgttactgcctacaagaacttgcctctccctgcatttcagatttgatgtttttcttaaaacttcaagtatttaaagtatttttaaaactttgcaaaatcccattttctctgtttacctgatattgttgatgttgttattgtaaaaagtaagtagaatatattcctcatctatgtacgtttcaaaactgagttgcagctttttttggtaagacccagagtcataaaagactgcaaatactgttaagctgcttaacagaaaaacaaatgctggtaaatgtgttcactggaatactacccgtcatttataataaataaatgcctgacacacagaacaacataaaatatctaagtatttataccgagtaaaatatgccaaacaaataagaatatatactatgtcatttcatttttataaatgctgatgaataaaaaatgcatctgaagtaaaataatgaggatcagtagttgctgggggaaatggtagaagggaaggggagaggaggaggaatacagcagaataagaggaagtgttgagaagaattcacttgtccactttcttgataatgacgacagttacatcacgtttattaattgtacattttaaatatgtgaagtttattatctttcaattaagccacataaaatgtattacaagcaaatggaaatttagacaagcacggagtaatagaaagatacaaacatatgttaaatgtcagaagtatctgaaaattagtgtgtctggaccctagttctctccatattttcaggtgagtgctggtggcaacatcacacatgctcttactacagaaagtgggttctgaaaaccacaccaggcacgtccagctttgtcctggagttggtttagggggatgtcacagccagtgacgaggagcacagggccagataccagcgttcacttatcccagacatgaactcctggatgcatacagagccccctccacttgtgggtttacttccacttctgtaaaaggagaaaatattgactcctacagaacataatttacacaaatatttacagatgaaatagggtgatcagggcaaagtgtttatcacagcacaatttcataagacagcatattttccaaataccatcgtcagcaaacatctgcagggcaccgtcttattatctgggtacagcctattcctccagcgtcccaccctagagcttgttatatagtaggagatatgcaaatagggacctccctctactgatgaaaaccaaccgaaccctgaccctgcagctctgagagaggagccttagccctggattccaaggcctatccacttggtgatcagcactgagcaccgaggattcaccatggaactggggctccgctgggttttccttgttgctattttagaaggtgaatcatggaaaagtagagagatttagtgtgtgtggatatgagtgagagaaacggtggatgtgtgtgacagtttctgaccaatgtctctctgtttgcaggtgtccagtgtgaggtgcagctggtggagtctgggggaggcctggtcaagcctggggggtccctgagactctcctgtgcagcctctggattcaccttcagtagctatagcatgaactgggtccgccaggctccagggaaggggctggagtgggtctcatccattagtagtagtagtagttacatatactacgcagactcagtgaagggccgattcaccatctccagagacaacgccaagaactcactgtatctgcaaatgaacagcctgagagccgaggacacggctgtgtattactgtgcgagagacacagtgaggggaagtcagtgtgagcccagacacaaacctccctgcaggggtccccaggaccaccagggggcgcccgggacactgtgcacggggctgtctccagggcaggtgcaggtgctgctgagggctggcttcctgtcatggcctgcggcggcctcattgtcaaatttccccagggaacttctccagatttacaattctgtactgacatttcatgtctctaaatgtaaaacttttttgtcctttttgtttctttgtttttgtaacaggaggacacaccctcacctccacagaaaccacagtgtcactttgggggcagatgatccttctgtggtcagcaggatgaaagttccgaggaatctcaggggaacccgaagagtgtttgccagttagactcagggcagcgacctccacgggaatctctgattagaacaggctttgagttctgataggagccaagagagacgctcacacagggtcagggtccttaaagcctgatggttttcacagctatcccccctggtcttgtaaaactgtgtacatatgactcagactgattcacttgaccccctttctgctaatccattttccttctctgcatacttgattctcacaattccctttcttctcttccccgaaaactgaggatgtgttttctgtagtctaaattccagggctcaggtctgcaggacctgggtaggctacggggactttctcactcaccattgtctggactctcctgttgtcgtctgtgaacagagatgtttggaagatgaagtggacattagtcatgaagggaataatactagttttctccaatgggatactgatgtagagctgatcttgtgcttctcacactgtcacagagtttggactctcacccgtgactttgaggagagctgaggatggacactccattgtgctgtgagctctgggtaacaatagtagggcctggctaggcagcctaaggtcaatactgctggccttcaggaaagacaggctggaattcctgggaagacctgcatctgccgtccaccatggagtcccatcgtcttctattatgccctgattgaatcagccccacctaggttatctagaacactcttcgtgacttacgaaaaaataatgggaggctctactaacacctgtgttatgccatgggagcaacacctaagctagtgtgtgattgagtagatgagactgtggtctagtcaaggtgacacataaaattaattgttgccattataatattttattatatatttggcaatatagtcgtgctcatattataaatacttttgctacgttgttgttatgtcagaagcttttgaataagaacagcttcatcttgaataggggctaggaaaaataagactgagacctgctgggctacgttcccagtaagctaaggcgttcttagtcacaggatgagataggaggtctgcacaggatccaggtcataaagaccttgctgatgaaggttacagtaaagaagctggccacagcccaccaaaaccaagacagtcacgaaagtgatctctattcatcctcactactcattatatgcttattgtattgccttaacatgctaaaagacactccccctagtgcatgaccgtttacacatgtcatggtaacatcaggaagtttccctgcatggtctacaaaggaggggaggaaacctcagcttcaggaattgcccaggggactcatgaataatccatccgttgtgagaaatacattcatccctttgagagaaaatgcacagggggtggaatgaggctgggaagctgatggcacatggtggaagcctgtccctgagtgaaggagagggggaagctggattgggtggaaggtccctatatttgtgtgctgtgcaaggaagtgcaaaatataattgagttttgtgcaagtcagtgctgcctctcaggtgatccccatgactcccagaaatggctctgcttaggaatccctgaggagtcagtcatttcattagagtagaccacaggacatgggcttcagcacacgccatgccacagatgtcagaaagcagctgctgggaacctgacccacctgcattttgctgcctgtaggaaaaggcagggaggtgcatcctcagggacaacacactgttttggatttctataaagaacacctgcttttactgtgttttattggaaaatacatgaacaaatgtgagcctgcaaacaattgtaattttcagttattttaattgcattcatttgtaattctgcatgatatgctgacacagagttgcatttttcatagatattgttcaatgaatcaagaacatgcattttccactttcactggtttttctccgtgtgcagagaccttgagtagagcctgtctggcccttatccacactatctcttgtgtccccgggaaaaagcagagatttgcctgactgcagaatctggggtaggagtctgctcagctcacagcctgcagagaagcccagtgaagttttatggagtcagagagctttcccatgtggggaacctctagcttacccatggccagagattactggtcagctgtaattgagagtttaacaattagagcactcagaagcctatctcatcgcagcttcattatgtaacttaccaccattagactgcggtaataactcaatcttgatttttctgaccccattttctcatcttattcatttgtaaattgggttatagaaaatgttatgttttagactctgattcaaatctcagaagtttatgaactcatcaggaataatacaaaatgtgtctagttttggggaaatgtaaatgaatgtccatgcagtgtgtgtgtttgttgtgtggggatatgtcagtcacaccccaatgaacatgatttctgaattatatcatcaaactacaattagatttgctgaaaattgcctgcagtaatgtctgtgatgatgaacctgtcaccttgttgtgaggatgctcagtgcacaggcgaggttgcacaggagacatccaaggagcagcccccaggcttggcagaattcctggccaggagccagacataggactgggtgtctcaaaagcagattccccaaccccatccctttatttggactgcatgggcatcatgaggaccagcaggagatgctcagaactcactcaaggcagagcaccatttaggagcaggtgcagcgaggaaacagccagagaacctctgactagaagcttgggttgttttcttttgcttaagagcatccaagcctaagtatatcaaccactatatgtatatatataagtagactatccactatatatagagagagatagatataatctgtatatatatacagattatatctatctatatacattatatatacagattatatatatataatctgtatatataagaaagttatgagttacagattatatatatacatttatatatatacatttatatatatttatatacatttatatatatacattttatacatattatatatatacagagcaaaacgaggtaaatatgactctgccattaactccttgaacctgggtcattttttctgagaatgccgtcatctacagcatgatggttctcatgtcaaaatcaacacgcatagttagtcaccatgaagactgttttatctcatggtagaaatgtttatttaattaaaaaattacatttcatacgaaagggtctgtattatttctttctcacactgctgtaaagacatcacctgagaccgggtaattcgtaaaggaaagaggtttaatggactcacagttctgcatggctggggagcctcaggaaacttacaattatggtggaaggtgaaggggaagcaagtcccttcttcacaaggcagcaggatggagagagagagagagagagagagagagagagagagagagagagagagagagagagagaaggagaagcaggataaagagccggaaacttatcagacaaaccaatctcctgagaactctatcaggagaacagcgtggaggaaaccactcccacaatctaatcacctctcaccagacccctcgcctgacacttggggtttacaattcagtattagctttgggtgaaaacacagagccaaaccatgtcagaatttctaggtgagaattggtcaattcataagttattagtgaagtatcagaaaaataaatagcaccagtgttgttgttatccagttaatttataaaccatgtcaatatccattttatgagaggtgtaggaaaagtgtgagatggatagatagatagatagatagatagatagatagatctaccaaatacaatatatataactatattatatatattactatgtatataatatatagtaagtgatatatggtatatatatatgacattaattctaccaaatacttcacatatgtatgtgcatatatatataatattaggtatgatatatatatgaaatatcaggacatatatatatatatattttataatgtctcctgggatttagtgttgaattttttaatatctacatgtattccaggataaatgttggtggacttcataaaatatattctaatttttatgtgcaagatgatcactttcaaataaggtttagctacagaaaccagatgtatctttctaccagaaattactggaaagcacagtgaaatttcttaatcaggattttaagatgcttgacaccactcaacaaagacagtgattactaagagagagaggaaataagcataaggagccctccggtgaatgcaggctcagatacttcctcaaaggtgttgccaggctacagtgctggagtggaaaccatgtggatttagcattaataaaatggagctggaaacccacgtaggccaagaagtgtggataccacaggatagcaagtggattgcagaaaactgtcagagagtgaaccccatagatggcaggaggaacacccagacttgacagagtgcagatcagtgtgtagaaagcagggaaagttgtacgtgagaacacaccctgctgcaggaagctctccctaaaatccagagccatggtaaatatatgaatatacacttacaaactttaaaacatacggaaaggcaccataataaagtcaaataaaggaaaggtgggttggctacattaaaatataaaaagagtatttctgagcaaataataatacttatgaggggaacaattttattctaccatggcaaatgatttcagagagcaacattcgaaatgcttatggccataatgaggaagcttcaaacaagtatacgaatagaattattaccagagtggtagtaccagagccctcagctttctgatgaaaactgattcttattatgaaagctaattattattataagcttattattattaacactaattattattaattataatattatataattattataatattattatgaaagcttattattattatgaaactgatattactagagccctaagctaagtgttattaccagagtcctcagctttccgatgaaacaacaacgtctgataaaaattgtaataacccaaacatataaaatcaattcaaattattctaaggatgcacagtaaataaaaatcattgattgataaagtgtgctgctatagactgaatgtttatttccgccctcagacatttgttggaattctaaccccaatgtgatggtgttacgaggttgggccgttggtaagtgaatgggtcacctttggaagatgactaggccccatccaccctcatgaatggaatcagtgcccttgttagagactccagaaagctccctctcctcttccaccaggtgaaggaaaagtagaaagatggtcaactatgaaggaggaagcaggttctcaccagataccagtttcaaagcatgttggccttgcacttgctgaccttcagaattgtgacaaatacatttatgcttgatctgaaccacccagactattctcttacagcagctaaaacatcaagtctcagctagggcagtgagggcccacaatacttgagagacgagcatcaccctctcctttccagttcaggatgacagaagcttgatctcgggctgaactgacaagcagagagtccttcctctcccccagatcgcagttgaggccgtggtgtcagatctctgtggttgagagtgaattccagtctgtgatttcatggatgcctttcttcatctagttccacttatgagacagagattccatgctatgagttataggccaagaatagaggaaccccaattattcccacccagctcacctgtagggcagaggatctggagagctttctgggtgaggcacaaagagactgtatgagtccacccctcccatgcagtttcctgtacttaaagcagaggtgtccctctgacacagatgaaccctttcttccgcaccaaggcagaggcggttatatttttacagtggcagacagagggcataaaaacagaaatgcagagctctctctaatggatgtgactttatttgcagtaaaaggagaataatttcaaccctaggttttttctaaaatattataaatatttatggtaagttattaatagaaagctggtggcttcatgagagcaacacattaaacaggaatccactcatttcagcagacagaaggagaaaaaccataatttaggaataatgagctgggcactgtggcactgcctgtggttccatacacttgggagtctgatgtgagaataacacttgagcccaggatttcaaggccaacctgaaaacgtagctagaccccatttagtaaaataaataacattttggggtcaggacaaagttcaaaaactgcccctgaaatgaagcccaaatttaattgtgtaacactgtggattaatggatgacacaacagtgtcaccatgcctgctgtgagtgcagtgtaacacttggatgacatatgaagagatacagacacccaaacagagacatcagacagtgaagctgtcaaaggctgcactgccgagcgtcaggctttttatggaaaccgtgtgtacatctggaactgcacctgggaatgacgacatcaaccctttaatagtgtcggggaaagagacgtcactgaaatagacaaactaagggactcaagaaataaatagagcgattggttttaccaatacaccagagcgttttgggtgatcactattcagagtttctgaattgtgttacctaactgtcattcagaaaataattatgagatacacaaagaaaaaaataacgtcacgaatgtacaggaaaatttccagaaaacacaaactgtctttgagttggtacagattttggacttaacaaatggagacttcaaaacaattattataaaaatgcacaaatcacaaaggaatactatcctagaaaagttaaggaaggtatgatgacagtatctcaccaaaaagttaatatcaataatgagagagggtttttgaaagaaagttatagacacgctaaaattaaaaacacagtaattcaaaactatatgtcagaggtgataagcagtatacttgaacctaaaaagaaaaaaaagcacacttagatatatattagtagatatgctatattcaaagaatagtgaaaattgcaataaaatgaaataagcttaacataaaaggtggaccctgctagacaaatcaacatatgtttagtgtgaacattagcatgagaagagagaaagaaatatgtcacaaaaatatgtcataatataatgacagataattccatgatttttatgataaatactaatatacacattgaagtatgaatagctcaacaaactcaaggtaaaataagttataagagatcctcaacaaaacacattataataaaatattttacagaaaaactactgagaaaatcttgaaggcagtgagagaaaaacaacttctcatatacaagataattctatcaacagctgatttctcatcaataacagctaatgctaaaaggcagcaggatgacatattttccctttgtatcccattttatcctcaaaggccacctgcatacaaagtagaccagtcttacaagaaaatcacagccctagtgttcttctctcaaggagcccggctatggacctaatggtgccctccccaaagtcataagtataattcccaacctgcaatgttacagtatttggaaatgagacttttgaaagtgatagagtttgaatatttgtcctctcccaaggtcatgttgaaatgtaatcaccaatgctggagggggggcctggtgggaggtattggataatagaggcagatccctcaagaatggcctatgcaatccatgtggtgatgagtgaattttctgttagttcgcatgaaatctggttgtttagaaaagtctggagcctcctccatctcttctcttgccctttcttggccccatctcttctcttgccccttctcttgtcatgtaatgcacctgtgtgcctgctgcctctttgccttccacaatggttataaactttctgaggccctcacaaagcagatgctggcaccacgcttattgtaaagcctagcaaatggaaagccaaaatgaaacctgttttatttataaattttccagcctcaggtactctttcctagcaatgcaaggacacagcaacacagaaaattggtatcaagaagtggagcattgctattaaaaatatgtgaaaatatggacgcagctttggaacaggataaccgtcagggatttggagggtttggagggctcagaaaaagtcaggaagataaagaacagttgggaaagttttagagactggttaaatggtttgaccaaaatgatgaaataaatatggacagtgaagtcaaggcagagaatgtctcaaatgtaaatgagaaagttatagggaagtgaagtaaagatcgcctgtcaagcaaatcacttgactgcattatgttcatgtcctggggatctgtgcaagtttgaacttacgagtgacgacttagggtatctgacagaaaaaaaattgtcagtagcaaagcattcaagatggagtctgcctgcttctaacagtctaaaatcaggtgcagaagtgaataaatgacttaaagttggaacttctatttaaaagagaagtggaacatggaagtttagaaaatgtacagcctggttctctggtaaagaaataatccagttacactgtgaagcaaccgcttgctagaaagattagcttgactaaaaaggagctgactgtggtaatacaaaacaataggaaaatagtcttgaagtcaattcagaaatctttgaggccaattctctcattacaggcttaggtataggagcagagaatgtttttgggggtgagaccagctagggctcaaaggtacagctcggttcaccacgtctgatggcgcaagctgtgatccttggtggcttccatgtggcataaagcctgggtctgcacagtatgcaagagtcaacatggcttggtgactggcctctagatttcagaggatgtgtgagaaaggctaggtgccagaaatgagcctacctcagggtcagagtacacacagagtaatttttccagggcaatgctgaggtgaaatgaagagttaaatcccccaaaagagatccccaggagaacactgtgtagtggagctgtggagagaaggtcactggccctctagaacccagaatgggagatccaatagcagcatgtgccccaagcctagaaacgctgaaggcactcagctctaaactgtgacagcagccgtgttggctgcactgagaaaagtcacataagcggttttgctctcagacttgcgagcccataattgcaccggctgcaagatgtggagtcactggtcactttggaggcttaagatcgagcgcctgtcctgctaggttttaggcttgcatagagcctgttactcattcatttggcaagttcctctcttttaaaatggagatgtttacccaatgtccgcaccaacattgtacctttgaagtaaataagttctttctaattttacaggctcacagatggaagaaatgtgggcatgaatctcagacaagactttggactttaatggtgaaacaagttcagatttaaggggcagatttcgaggggtgggtattgggaagaaaatgatcccattttgcagttgagaaagatataagattttgggtgataagagttatgtggcttccatatatgtccattcaaaaatctcatgtttgactgttatccccaatgttggttggggttttgcgttacgggggcggattcctcctgagtggcttagcgccatccacttggtgacgagtgagttctcacatagttagatcactcaggatctgattgtttaagggagacgtggatctccccctttccttctttcccctgctcaccatgtgacactcctgcttcccctgtgccttttaccagaaatataaggtttttgaagccctcaccagaagcagatagcagaaccacacttcctgtacagccttcaaaacagtcagccaaattagaatttattttttataaatttctcatccccaggaatacttttatagcagttaaggaatttctataagaaagaaagtactgaatttaaaggagacgatgagggtgaaacatcagaatgaaattactgacctcatgagtaaagacaccagacagtctctctctctctacttctctctctctatttctctctctctctctctctctcacacacacacacacacacacacacacacatgccctaaatgaaaagatcatatgatcaagtaacaatatgatggctgctctgagccaaaagtagaagcctcaaactaaacctatcttgtcagcatcttgatcttggagttcacagcactgataaatggaataaaattaatgttgcacgagtcaccaagtatgacagtttgtaatggcagcttaaactgacgaaagaaaatttggggttaagaagaggaaatctgatgttacaattatttgaacattgtgaaagtagcttggaattgggttatgtgtaacaggatggatacctttgacatatatgaagaaatttgcatattgagggtcatgctgatagacagaaatgagtggttttggaaaatggagcaatagtcatccttatcataaagttttttaaaaaaaacttggctgggcagtgatataatatttagtgaaagagaagttgtgagtagtgagaaattgtgagtagctgagaatagttctaagtgttgaagatattttgcttgattcctcctgagtgcttaaaataagtgaggtagataaattaaaatcagaaaaaaataaaagaaaaagaatacaaaagctgagggcttagaaaattcacaacctatccatattgcaaaaatcagaaactgtattctacaaagaacactgagtatatggctcaaatatcactcagtaagaagcttaagatactctatgaaaagaaatatttcaggttttaaagaatgagaattgacctgagacaaatttgatgcatactgttagatttttcagatttaatggcctggaataatagagctacttggctgcaaatgtacacaattcttccagaagagagaaaaataagctttaaatttatttagaaaccatcagaccactgcctctatttcaacagaccagaaagcctgtttctaaaatcttgaggaagaaaccacccaacagaggcttgggttgggagcacccagcaagccctgtgtgtagggctgcatgaggcccttgacatgggagctgggcctagcagtgcctcaggagcggtgcctctgcctgcagctttggagctgattctgctgctcgaataagctgagaaggaaaaagaatgtttcagagaagattacagtggaggcttaaagcatatggcaatttgttttcctatgcattgtatttgctggagacaaaccacccattttaccccctatttttttctttggcaatgaagctttctattctatgcctaattcaacaggacacagcagcggctgtatccagtttgacaagattcagcatgaaaggttcctattacctgtgccggatgcatcactgatatgcggccaccagtttcttaggttcatatcactttaagggaccaaatacaaatgtcaatagcatatgtcattcttaaactgcagaaatggtgtcaaagaagaatgtggagataagagagcaggaggaattatgaaaatccagatagcatcttctcttctagagtggaaggtacactagtaatttcatgaaacaataaaatagatgaaatgtgtcatcatcatggagtgtctcacagtggcagtgcacaaataaatttctaaaaattccataaggtaggtgtgatggatgaggcttatttccacacagggagcccataaatacccagataagtaaaaaatccaacacctggaacgaaaaaatgcctcatcttgacatcacaaacccatctcagtaagtccgaggagtaatgtggaaatgaaacggaaaattcacaaacacatttattgtgaaatttttagcacatgtttgaacattaaaacagaattgtccacaattttaggaaaaccactccatgacaatgagtcactacactcatagaaacaccactgagtcaacagagttctaactgtcagcaggtcagtactgaggcctcaggagaatcaaggctctagggtacattttacagaacccagaattgagccacacaatctatagccaaatgatctttgacaaacttaacaaaaattaacaaaaatatataccagaaaaaggacaccccattcaataaatggtgctggggaaatggaaatgaacatgcagaagaacaaaactagacccctaccctcaacacatacatactcaacacaaaatgaattaaagacttagatataagacctcaaactataaatgtactcaaataaaataccaggacaactcttctgggcattggctgaggtaaagaatttatgactaacaccccaaaagcacacccaagagaaaaatagacaaatgagacttaattaacctaaagagatatttcgcagcaacagagtgaacaggcaagttgcaaaatgacagaaaattttcgcacaccttgcctttgacaaggaactaacatgaagaaattacaaggaattaaactatacaacgacaacaacaggaagaagaaccaaataaccctattaaaatgagcaaaggacatgagtagacatttccaaagaacacatacaaatggataataaatacataaacaatgctcaacatcactaaccattagggaaatgcaaattaaaactacaataagatattatcttacaaaagccacagtgactattattaaaaactcaaaagtatcagatgttggtgaggatggaaggtaacaggaactcatctacactgtagatgaggatgtggacgaggacaacctctatggaaaatagtatggagtctgcccaaaaaactggaaatagaactgccatttgatgcagcaatcccaccactgggtaactactcaaaggaaaataaatcattacttcaaaaagatatccatgcttctatgtttaccacaaaactattcttaataacacacatgtcaacctgagtgtccaccaacagatgattttataaaagaacatagcacgtatacacaattcaatactagtcaaccacaataataaatgaaactgtcttttgcagcaagatgcctagaactgggaacaacataattagtgaactaactcacaaacagagagtcacatgtcacacattattatttataagtggaaggtaacaacgtgtccacaaggatatggagagagaaatgatggacaccggagacttagaaggatgggaggtggaaggtgggagcatgaggagacattacctagtgggtacaatgtacattatttgggtgagagtacactaaaagccaagaccactgtggaatatatccatgtgcaaaagttgcactcatagcctttaaatttatataaataaatgtacaaacaaaaaaattaaaaatataaaataattaacagttgaccaatgatcttaaagttaaaatttagaccaggcgtggtggctcacgcttgtaatcccagcactttgggaggtcgaagcaggtggatcatgaggtcgggagtttcagaccagcctggccaacatggtgaaaccccatctactaaaaacacaaaaattgaccagatgcggtggcaggcacctgtaatcccagctactcgggaggctgaggcaggagaattgcttgaacccaggaggcggaggttgcaatgagccgagatcatgccactgcactctagcctgggcgacagagcaagactccatctcaaataaaataaaataaaatgtaaaaaatgatcaataaatgaaattactatcagttgaaactcattaaatttaaagacattttctactcaagtaactataagaacatgaatgtcaagtttcagatgggaaactattttcaaatcagataaccaccaatttaattataataagaactctcaggactcaactgtgaaaaaaaaaaaaagaaagaaagaaagaaacaacccatggataaaataggcaaaggtttgtgcagacatttcatcaaataagatgtgcagatgacataagcatataaacaggctcttaacaggattttccattaaaggaattcaaatcaagcccacaatgagaaaccactatacactttttagaatggctgaaattaagaagaaatacaggtaataccaatgctgatgagcataccaagttcctagtgtctacgacattgttaatgggactgcaaaatgaaacagctactctggaagataatttttagttttttctgcaatcaaacatgcccttaacacatgacctaaatatcccactcttgaattttgcttcagagaaatataatcttatattcacacaaaacctctattcaaatattcaagatattgcgtgtgtgtgtgttagaaactaaaaataacataaatatctcaaaatctgaataggtgaaaaaactaggaagcaactataaattgaataccatcagcaataaaaaatatcaaatgatcgattcacaaaccattacaggtgaactccaggcattacgctaagtgagagaagccagtctcgaatatcaaagggacacagctgtaagcagcacggtcatcctcaggtgtcagtggtttgggctgggctttctttgtctctttcctgaccagacccagatgttgagctctgccacttgcagatggaaaattctactattttcaaccatgcactgaggtttgaattacttcacagactgaccaaacaaacatgggctccactgaagagtgtctggcatttgtttcaaccacaagagaacttttcccagctcttccatgtccttggttctctcctgcaagccagcagccctgcagtgtagcctgcatctcccatgcatccacccagctccttccaagggccttccaccacaccctccactgtttttgagagcactggcaggctttcaatttttccacattctgttgttactgaagttaggatgtttaggacttattaagatcatattttatgactgaatttcattgccccctctctcctgggacagagctcctaaacaaggttctgcaggtgtagacaaagttgagctgttttattcctcagcctaggagctgagcgctcagtggagggtcgggcaggagcttcccaccttctcagcacttcggttatggtggggcagaacctctgccataggacagagctaggaaccagagacccaatgttcccagtggcgctggacccagggcagagcctccatccatgagtggggctctatggaaggagtgagtctctggctctcagtagctcttgtccagcactgaacctcagcatcatgtgctgtgggcagggtcagagggccaacgtactggcccctggggaagagtttcctctggtgggagttggtagaaggtgccctgtcttcttggctgcatctgtccgcagtggagtttacatcatgctgagctgggatgtggaaggaaggaagagcaccttagatcaaatacgatgactggccttactgagttttctatattttcttaaataaatatttcttcacttgctttatgctgttagatcctttccaaaccctgtaattttttcaaaataattttcactggtctcatgagggcatggattcattgagcccctcatgctgttaaagagaaatagaactgtttttttttttcactttttagcgaacatccatgggttataaaataattagttgacatttcttccaacactttacagataccatcaactttcctcttgcttgtgaggttttaaccagaagaatgctatcatcatcttttctgttcttttggaaggaatgccccctctactcacctccacttgcctgcatatatttctatttgtctttgcttttcagcagttttaataagatttacctaaatgtgtgtgggggaagcagggggtgttattctgttgttctgtgttctctgagatgcatggattcaccatttactctgcctccattttggggaacacagttagaaaaaatgtcagtgtgagcccagaaacaagcctccctgaagggggaacaggaccacccgggggcgctcaggacccactgagcacaagagccagcctcagggcaggtgcagacgggggttaaggtctggtttcccgtcagccctgtggcttcctctccataaaacagtttcctctggggcacttctctggattccttatcctgttcttcctattcttcctgaagaagaaacatttgtcgtaacaagagaaaaattttctcacatgcaccaaaggcagagtcacctacagtcacttattccggtttctcaatgtgaataaattatcaatgcttctgaatttaatcagctaaacctattaaaggtgcggtgtttaactcaacactgccgccagctcaacagaactccaagggtcagtgagcagcaggcaggataaagggcatgctgggcactggggcagagggagttagcatccagtgcaagagaagaaaggccccgtggtggtcactgtcaggacttcaagcccatagttccaattgtaggtgaccacgttcaaaagaagagagacctcatccatgattagtgtgatgtgtcaagtctgatagtgccacactcacacctcaggtgattatgaaaagatttaccaactctactattgtctgctgagagcagcacaggcctctcaagaaattccaaactggaatttcctcaatggaacaggaaaggaggctggcttagggctttataatgatttggtggtggggtcggggggtcatttatactcaggagaaggagcttgtgtgatttaaacctcacattggcatcagatgagggagcttctacgatttctgactagatttcccatatgtgggggacaagggagaagaagaataaaccttaattcatcagcagcaagcaccaaaataggacctgacactttattctccctagcagcttaagaaaatgagtgaaaaagagagatgagggtccactgtgtgtgaaaagcaaacagaaataaagaaaataaaaatttttattatggtaagcacataataaaaagaaagagaagaaggaatgagacagacagtggtgctgaatcaatgtcctgggtggggccttttcattatccactgtcatcagtttattctgaaggtctcaggtcagcttcctgcttcaaactatcacaggcccttatagggtatataaaaatccttataggatatccacagtttgtcatactttactaaagtagtctaataattagatgaagttctgaatttaatattcagttataataaatattaaaaaataccacaatctacaaattaggaaaccgagactatatttttatcaagggttacagccatcccatatgctggaaagcatagttttggtaaagatgagagacagacactcccaagaagaaggagttgggcagaagatttatgctgaactgtttggctaaacagacttagtcaacaggttacagagaggctactgatgttcatggaggtggtgctgacacatgcatactgaacacacatgcatttaacatgtgagtcctgttcaattgccagtggtgacttagcatttaaattcattacagtcaggccctatgtgcaaacagcagaagcagagacacaaaggcactcagggtgcagcctctgtaaacagccagagccaggccatggtcagcggtctctgatcaggagaaaggtcctgatatcaaatgttcaatcaaagctggggttatggcttgtggaacagggggtcagttcagcagggatgggctgcaattgtcttcatagtgcttgtctcagtgccagtgcttactgagccaccagagaaaacgaataacctattggcagttagaacatagtttatcttttaagtgtagaagtgagtggcaaaatcctcgtctagcaaggccttaggtcttgtttataatttgacatcttactgccactgttctgtcagtcttatgatttctattttaacataagtgttggccattgctgcgtctaaaccacaaagggaagaaggtataacgaggcgtgtctgatctcttgtttagacatggttggaaacagtttttggatttttacggggttccctaggccaagagatggactatttaatcagtcgtgggttttagggatttatttttaggttacagtttataaatatgaacccaactattgactttctgcaatttcactgctgtgttgtggttaaaagtacctgataaaattccttccaaagtggttcaagagcaatattctaccctgatgtttcttacaatagatataattccctgctttaatgttattagaggctattgaaaagatgtagggaaatgatggtttaatctgttgatgaatagtgtgggtaaaatgcagtcatcactttcaacactttgtcatgcatgcatgtaataggacagaggtgagcattgtgggtaaatctctaaatgtatgggccttccagctaccaaataataggctaataactgatgtctccctgaggggattaactataaggctctcttgctagggagagaatctttggccaaggaagttcaagattttcttaaggtttggacaattttagtttaaggatgacaattttcttcaacattttcagaagattgtggatgggatggatgctatgttgtatacataatgctaatgccttccatatttagataatattataaacccctgactgataagactgcttgcttggtgtgatgacccactacaatatgtatactttcagttggtatgctatgtcattttccttcaggtttttactttccaagttacattagtcaggtctctaaaatgcaggactgcatctaaaatgtgttattttgttgtgcattttcacatgttccagaaggtgggagaaatttctttgtgtgaagagcatcccaaagtcaggcactcctctagaacacgtgtttaatccttgtctttggcttattgatgagctctgttgactgcaataacttctgccatccgggctgacttgacatcacatagaggaacaaattctgaatgaaagtttgctctactcaattgagtgcataacctcatttcattactgatgtataatgcatcagagataatattagatcaaggatttcaatgggaatctaatctaaaagatgtaaacaaattttcataatttagataaaattactgtgagcacactgctgctattcagccatgtctcctatcacactgaatccacactaactttgacctaaaagttagcatttgttctaatgttcagaattgttatttttatcataacgtctctagatgattacagagtgtggctatgttggccatcagtaaaggaaagctattttaactgaatgaaaatgagacaaagcacacaacctaatgtaatggaagtcaggacatgagtgtctccaggcttttgtgtttcaagagttcatgcaccaggggatttcttttcttacttgtacacagagcaacacccaaaatgttcatttcctcttccatcgactcttatcatctgtttctatgtcagttagctttgaatttttgaccccagctgcattcaagtagctgcaaataagcgtgatttcattcttttttatagctgcatagtattccactgtgtataagaaccacgttttctttatccagtctataacggatggacatttaggttgattccatgtctatggtactgtgaattgcacagtgatacacacgtgagtggatgtgtttttttgttacaataatttgttttcttttgggcatatacccagtaatgggattgctgaggggaattgtaggtctgttctaagttatttgagaaatctctagatcgatttccacagtgctttggccaagttacattttcaccaaaagtatgtaagtggcgcttttctctatagccttgcctgcatctgttaatttctgatcttttagtgatagcaattctgacatgtgttagatagtatgtgattgggttttgatttgcacttatctgatgattgaggatgctgagtatttttgtatgttagttggccacttctatgtctgtatttgaaaagtttctgtgcacgtcccttccccatttttaatggggttatctgatttatgctgctgatttaagttccatatagattactgacttgcacacacggagaaagccagtattcaaaactaaatagaaaaacataatcacttgtaggtatagacatactgaatttggaatggtcatggcttgcatgttggtattgaaatgggacagcaactttggaaaatggtcttcactgaaaatctcatacacaagtgtacctggtgtcaccacttacagtagttgaatggagaatacaactcaagtgcccatcgactgccacagggatgaagacgccgcggtgtgtctgtgtgtctctaacccacagggatgaagacgctgcggcgtgtctatgtgtctataacccacagggatgaagacgccacggtgtgtctgtgtgtctgtaacccacagagatgaagacgccgcggtgtgtctgtgtgtctgtaacccacagagatgaagacgccgcggtgtgtctgtgtgtctctaacccacagggatgaaggcgccgcggtgtgtctgtgtgtctctaacccacagggatgaagatgccgcggtgtgtctgtgtgtctgtaatgcagctttaaagaggagtgaagcactgacataggctgcaacttggatgagccttgaaaacattgggtgactgaactgagggagacacggaagtctacatccctaattgtcccattgacacgaagcacgcagagcaggaaaatcccagatcacaggaggtcaggggaagggaaacacagagtgaccgcttaatggaggtgaggtttccttttctgtgatgaaaatgttcccaaaccaaatagtggaaatggttgcacagcattgtgaatgtgtaaagtatcactgacccatacacttaccaagggctgaaatggtaagttttatgttatgtgtatctcaacacaataaaaatgagtgccacattttgtttagcatatcaatgacaataacagttcaggtaaatgctggattcctcatcacaaccagtgcttcctgatggagctggattcaggggagggactggagtgggttgggtgcacaggtcatgaaggcagcaaaaattccaacccactcctcaagagtccagtcaccacctccagatctatgtccaaaaaacagctcttcctatggctgagctacatgagcaacaagcaaataaccatgttttttgttgttgttgtttagttttgttttgctttgtttttagacagagtctcgctgtgtcacccaggctggagtgcagtggtgcgatctcagctcactgcaatctctgcctcctgagttcaagtgattctcctgcctcagcctccctagtagctgagactacaggcactcactaccacgcccagctaatatttgtatttttagtagagacagggtttcactatgttggccaggctgttcttgaactcttgacttcgtgatccacccgcctcagcctcccaaagtgccgggattacaggcgtgagccaccgcgctcagccacaaccatgtatttttaagcaaaagacacagtgaggggacatcagtgtgagcccagacacaaacctccctatgcgggttcacaggacagcatggggtgctgaggacagaggtgggcactcaggaaccagcagggaaacccagggggcgcttggcacttcatgggggctcaggaccattgtgggctcagtggtcaggcaggctcaaggctcagcctcagggcaggtgcagcaggcggggaaaggccctggagactgggtttagtgtcaccttctcattgcgccactggacaccctccactacatctattctaatgtgtatgagtacttatgagtttagaaaataacattgatattataaatctatagccatatgtgggtgcatcaagttaccctcttcaacctatgtggaccctgttcatcaggaataagtccctgcatttgaggaccttataaatcaataattatgtagaatcactttctttttcagtctcatttcctccctctttctctctctcacacacactgacaaacacgctggttgctataactttaattacctgatgtgttaaaaaaaattgattcatttggaacttaaccagtttagctgttgttcacgctgttatgtaaaaaagatccctaaatgacttctacctggtaagaggagggaaggcgttggaaggtgaaattgcaggagaaaaagaaaatcgtgaaacggattgatttgttttctctatgaatggtgattaggtcaatatttttcaaacggtgaacatattgtgtgaagattatttgtcaatattatctcattaaaactattacaaataaaagtgtataatttggtaaaaaaaatgaagagagaaataaaaataatacaagaaaagtcatgaactcctgactccacacgtgagttaaccctcagtttttctatgttacttagaaaaacactaagatacagccaaagaatatcatgatatctttataagaagagggttttgtaaccctcactcgaaatttctagctctgtcctagagttaatttagggagcagtcagatccagctgtgagaaacacgggccagacagtgagactggcttttaccagatgtgagctcttagacatgtcacatggcccttccgtgcttgggggtttaccttcacatctgtaaatgaaggaaactttgactcccacagaacataattcatgtgcatctataagtagaaatgctaatgagaattaattatttatgaagtataatcactcgcatccactctgggacacagcctactctgaggcatcccttccagaagtcactatatagtaggagacatgcaaatggggtcctccctctgccgatgaaaaccagcccagccctgaccctgcagctctgggagaggagccccagccctgagattcccacgtgtttccattcagtgatcagcactgaacacagaggactcgccatggagtttgggctgagctgggttttccttgttgctattttaaaaggtgattcatggatcaatagagatgttgagtgtgagtgaacacgagtgagagaaacagtggatttgtgtggcagtttctgaccagggtgtctctgtgtttgcaggtgtccagtgtgaggtgcagctggtggagtctgggggaggtgtggtacggcctggggggtccctgagactctcctttgcagcctctggattcacctttgatgattatggcatgagctgggtccgccaagctccagggaaggggctggagtgggtctctggtattaattggaatggtggtagcacaggttatgcagactctgtgaagggccgattcaccatctccagagacaacgccaagaactccctgtatctgcaaatgaacagtctgagagccgaggacacggccttgtatcactgtgcgagagacacagtgaggggaagccagtgagagcccagacacaaacgtccctgcaggaagacaggaggggcctgggctgcagagggcgctcaggacacattaagaacacagtaaactcagggaccaggtgcccagggaggttaagggctggtttcctttcagagacttagctgtttctccatctaacagtttccccagaaccctgcctagatttgtgatctgtatctgctcaaactatctgtgtcaccttcctcacctgtgactttgaggaagcttagtgtggacattccagtgggtggagagatcttggtgacagcaattgtgtgttctgtctaggcatgtctatggctggccatcaggaacgacaggctggaattcttggaaagaggcacacctgccatccatcaggaaattttgttgtcttctgttctgctagaattaaatcaggcacgcccaggttaactactactatcttcctagcttgagaaaattaatggtgggcttgaataacacctatatgaaatcatcagagcaacacctagattcgagtctcatttaataattgagactatgttctagccaaggagacacataaaactggtgattgccgtggtcagttcatatcatatatttgtcagtagaatctggctggtattatgaacagctttgccaacacatgtgttagtgttggtcttcggagaagcacattctatgaatggattaggtttatgtacagtttcctaaggaaccggtccacgcttttgagaggaaacgcagagcgggtggaaggaggctggggaagctgaaggcatatgagggaagttggtccctgagtgaaggagagagggaggataactcagtggaacttccttaaactgtgctgttctaggaaggtccagcaagtcactgtatctgagtcatgtcaaagtttcccatcggggacccccgtgactcccagcagtggctctactcagatcagcgcggagctcattgttctcctgagagtggagcacaggacgtggccccagcaccagccgtggcatgcacatcagagtgcagccccaggcgcatggctcaggtgcactgtgctccctgcaggtggagggagggaagacctgactcagaacccatatgatgtgggttccatacagaacacaacttttacttaatttctgtggatgacatagaaataaacatacagtctgtaaacaatggtgattcctacatttaccttgagagctttattctttgattctgcagaatgtcctggcatggtgttgcctttctcatgtggaagtgtaacataagttgaggacatgtgttccccactttcattgttttcctccatgtacagagatcctgagtggagtacagctgaccctccttccacactgttcctctcctccccacgggaacagcagataattacctgaggctgaatctgaggtgggatatgtcctgtgcacctcagagcctgcagagacccccggctgcagattcatggagtcaggtgtttgtgcatgtgggaatctcgagctgtgctgttgtcagtgaatgctgcttagaactaattgcaggattcagaattaggagaccccctgatctatcacacctcagctcattctgccactcatcatcttcagaaattctgaatatggttcagtttacatttttgtgatgtactgttctcatttcatttagtcatgagtttggtcagcagaaagtgctaccatttatgtgtcccaacctgatgaagctaatttgcttcacgagaagttaggaggctcctgaatcttatcctaagcctgtctctctgcactttcctttaaaattcagttttacctggaattctgttgtgttgatttagccagttttccccatactgagtgtctgattttcctggatatctgatcagtttccttgtccttcaccataacttgggtgacatctgatcaccctggtctaacttcaacaaaaatcctggcaggctgccctaagcaggatttacctcactcctgatgtttcttcttggtgattttccatcctgtgccccaaccctgctgtatgcctataaatcctcacgttctcattctgtatttggagttctgctgaatctctcccccactgcaaaatcccactgccctggtccctacacctatcatgagggccctggatgaagtcttccttactgtgctggaacaagtgtcttcatatatacattttttctttaacaaatcaacctttagtatttcctaattgatcaaaggacctcaaacattgcatgaaagcgaggatctccattttactataaggggtgttttgtgaatttcagtttccatgtgtggtgtccagaagtcctgggcaccaacggttgtgcttctctgtccaattctttgattctgaaacccgggagtcatctgaacatgagtaaataggtgacttttttcactatttagtgactgccttatttcatttaccctgaagcttcacgaacacattgatgaaaagtagatagagaacttgtttggaaatgcaagatttatagtagacgtaatcacctacatgattctggaggtcttcttagtgttccaagaaccagatgtttttcccaccacaggacaaagatgagaacctccacgctgtgaggatagaggacaggcagggcaaagatgagaacctccacgctgtgaggatagaggacaggcagggcagtgtgaggacaaaaggggctgtggtcacgtccagggtgttctctcctagcaacgcctccagctctttcctcactctgtggtatttgtcagatgggaaacatacctcaaatttatatttgacatattgatggaagtccaggcaagaggcatctgaaagcttatttctgaacctgcttctgtaaggaatgcccatatcccttggtctctttcctctttcttaactccattggctcccttcccctcctgcacacacccactgacgtttatggccacttccccacacccttcactgtagtaccattttcttgggctcctgggaaacccaacagctttagttaaactcacagctatgtacacccataggcccctcaggaggttctcagtttcactcctacagtctcccaggctgctccttggggtcctaacctgaccatctctaccctctctcctgagtctggccatccattgaacgtccctgctgccctctaatctggatttgtgtacagtagaaggttaactcagcagacctggattgtttaaaccctgcacattcctgaaaaacattgttcatttatggctctcagttacctcctgatgagaactctgagcccttaaaatgctatgccagataacagtgtctgtggttgtctgcagccttgggacctgtagtacacatttaatcatagtgctttgtagtgaatgccagctatttttttttcctgggtagcgggggagctgttgtctgagtattgtggtcagttgaaatgcctaaccttgttttcactctaactcactactttgaatcttccctgtttgtctctttaatcacctagccttgcttctcatgtaagtaagactctctctagctgggaaagctggacaaactccaattgaccccttaatttacaagacactaagggctcctcacccaacccccttccgtaaggagttaacctgtgtaaacagattctcagcatttcaaaggagcccagttaactgataaggtactagcaccaacaatgtatgaagttcccaggatttttctcaaggagataacaacataaagccttgagttcatgcccggcatagcccctatatctaattataatgaaagatttagagccctgcacctggtactgttgctctttttgtaaccatttgtcttttaaattgtttatctctctgtaaccattttgcttcttttgattcttgcatgtttttacttccgtagaattattgcacttgagttcccctccccttcctaaacctaggtatgaaagttaatcaagccccttcctcggggcccagagaattttgagcattagccgtctctttggccgctggcttaataaaggactcttaattcgtctcaaagtgtggcgttttctctaactcgcctgggtacaacatttttggaggccgcagcgagatattaacaccactgggcgagagccggtctcgctccgggctcccccggaaggatggccagctcggaggagggacaccacctgaggaaagaattttcaggtctgcaaagagtgaccgccttccagaggagagcggatcgaccactgtgtcagcgccctaaaagtcaacatctgagtcctcagcttctgaccccggggtcaggtaggtcggatgtgacttcgtttccggtgagaggggagcggccctgacgagggcgctgagtcctcagcttctgaccccggggtcaggtaggtcggatgtgacttcgtttccggtgagaggggagcggccctgacgagggcactgagtcctcagcttctgaccccggggtcaggtaggtcggatgtgacttcgtttccggtgagaggggagcggccctgacgagggcgctgagtcctcagcttctgaccccggggtcaggtaggtcggatgtgacttcgtttccggtgagaggggagcggccctgacgagggcgtccctcttttgactcagcccattactctaggatgctagtgggttgagccttcgttttccggtaggcgccttcgtatcttggtttgggtgggaagtggtcctgaccaggaccctcccttgacttagctcaagacccaggacgctggagagctaagccttggtttctggcagacctctctctctctcttctatcttccatccttcttttggaaatctccgggaaagggaaaaaaaaaaaacctgttataaactctgtgtaaatggtgtgtgaatgtgggaggacaaaggcttgcgtttgtcttccagtttgtagctccatggcgaaagctacggagtttgagtgggccctcacctgccgttctgtggtgacctcataaggcttaaggcagcatcgggcatagctcgatccgagctgggggtttatactggcctgccaatgctaagaggaacccaagtcccctcacggggagtggccaggcaggcatctaaatgatcccatcacgggacccccttcccttgtctgtctaatagagaaggtaaaacaggaaaactgtcatcattgtttacatgccctagggtcaattgtttgttttatgtttattgttttgttcggtgtctattgtcttgtttaatagttgtcaaggtgttacatgtcaggacatcgatatagtccacgaggtctgggtaaaaatttcttcaaggtccttagtgctgattttttgtcacaagaggttaaatttctaatcaatcatttagactggccaccacagtcttgtcttttctgtcataaacaagtaagctgttgttacggaaaagagtgtggagaacattcacctgattggaatttctggcaccatgaaggttgcgggtatttagattgtcataccccacgtcctagtgattggtccccttctaaactgaactggtggtgggttcaaaacagccaccctgcagaccttcttgctcacctcttctgtcattctgtaacttttcctgcgcccttaaataggaccttgtgtaaagaaacctacgcccgtcatgctttacttcgtttagactcctattctgttccactgtggctactttctcatcttaaggacgatccgagtggtccttttccccctcgtccctgccccttaccccgcacatctcgttttccagtgcaacagcaagttcagcgtctccaagacttcgctctgctctcactccttgaacccttaaaggaaaaagctgaatttgaactgtttgcctttgaatcgtggagacataaaaaacacttaggatataggtctagaagaagaagaagagggagaacgcctagatcgaactggcccaggagacctcaggctggcctccaatccccctccctcaatcttaaagctacagcaatgtggcaagtggtattagctgttgtggtttttctgttctttctgatcatgttaattctgtttttccgacactccagccccccagggaaagagtttctctgccggtgttggatctgatatctctgctcaagactttgctaaattgtctttaaataataataataataataaacgggaaacacctcctcctggccccgtaagggttggagccctctccagtgtatgctggaaaatttttctcttggtttctcagaggactatggagtccgccttagaaaaggcaaggtctggacactctgtgaactagaatgaccaaagtttggagtcggatggccctgtgaagggtcattaaatcctaccattgttcaagccgtgtgatgggttgttaccggaactcccggccaccctgatcagtttccctatatcgatcaatggctaagtttgattaggaatcctcctccatggctctgttcatgtgccattcgcaattccacctccaaagtcctcctgagccaggccgcgtttttgcctcaaccctccgccagttcggctccccctgttttgcctccctctgaagaagaggagagtcttcctcacccagttccaccgccttaccaccagcctgctcccttggcgccatcccgtgtctcttcgactgcgtcccctgtgggctgtgaccgcccattgccttccgctacgaccgcatgggaggaagcagcccctctactcccactgagagaggcacgagtcccgcggctgatgagcgctcagcccccttcctggtttatgtccctttttctacttctgacttgtataattggaaaacccataatcctcccttctctgaaaagcctcaggctttgacctcactgatggagtccgtgctccggacccatcgacccacctgggatgactgccaacagctccttttaactctgtttacctctgaggagagggagcatatccgaagagaggccagaaagcacttccttgcatcagccggtgggccggaggaggaagctagagacctcctggaggaggaggaagctagagacctcctggaggaggaggaagctagagacctcctggaggaggaggaggtctttccctccacctggcctaactggggcccagattcctcaggtggaaggagggctttggacgattttcaccagtatctcctcgcgggtattaaaggagccgcttggaagcccataaacttgtctgagacaactgaagttgtccgggggcctgatgagtcaccaggggtgtttttagaacctctccaggaggcttatcgaattcacacaccttttgacctggcgactcccgagaatagccgtgctcttaatttggcatttgtggctcaggcagccccagatattaggagaaaactccaaaaactggaaggatttactgggatgaatatcagtcagcttttagaaatagcccagaaggtttttgaaaaccgagaatttgaaaaacaaaaacaagcgacacaggcagctgaaaaagctgccgataaagcatataaaagacaagcaaaaatcttggtaacagctatccaagagggcagaaaggaaaggcctgcattccagaaaaatggccaaggaacctcgggttcccaccagaaaagtgaaagaggtgaacaggcccctctaggaaaacaccaatgtgcctattgcaaacagactgggcattggaaaaaggagtgcccgttactgccaaaagaaaaatctgaaaacaaaaaggttctcaccctggccgcaacagaggagcctgatgattgatggggccagggctcccttgctctcggcccccaggagcccatggtaactgctacagtggggggccagcctgtatgtttcctagtagacaccggggcagagcactccgtactggagactcccctgggcagtgtctcaaataaaaaaattgctgtacaaggggtaactggagctattcaagaatatcctgtcacacacacctgagaagtaaacttgggacagaaaagagtgacacactctttcctagtagttccagagtgtcctattcctctccttggacgggacctactccataagttacaggcctcaatctccttttcagctcagcaggctcatctcacactaggaaatgcaacttcccccactgcccaactcttgctaactacccctctgtcagaagaataccttctggtttcaccgtcgtaatcaccggaggagaatactaatactcttttgttagatctacagacacttttcccccaagtttcggccgagtcaaaccctcccggactggctaaacaccatccgccagtagtcatagaactcttggccactgccataccggtccaggcaaagcaataccccacaagtcagcaggctagagaggggattaatccccacattcaacgactgttacaagctggcatacttaccccatgccagtcggcctggaacacgccatttttgccggtccagaaacctggaacaaatgattactggccagtacaagacttaagggacgttaataaatggactgttgctgtccacccaaccattcctaatccctatactctactcagcctgctcccaccagaacatacagtatacactgtccttgacctgaaagatgctttctttgctatccctctggcccccaaaatccagccgatttttgctttcaaatggacagatccaagatcaggagacactacccaactgacttggactcagttacctcagggttttaaaaattcccctaccctttttggagaggctcttcagcaagatcttatacccttccgagccagtcaccttaactgtactcttctccaatatgtagatgacattttaataacaactgaaactatggatggttgtctacaacacacaagagacctgctctacctccttcaggagctcgggtatggagtctcagccaaaaaggcccagctttgtcttcccagagtgtcctacctggggtacaagataaacaaaggaaaaaaggcactcactagtgcccggaaagaagccatcctgcgaatccccactcccgccaccaagagacaggtacatgaattcctaggagccctgggatattgtcgtctttggatatcggggtttgcagagattacaaagcctttgtatactgctacaaaaggtaatggcccactgatttggacagacaccgaggaacaggcttttcagaatctgaaaaaggctttaactgcagcccaggctttagccctcccaaatatctcaaagccttttcatctgtttgtccatgagagccagggagttgctaagagagtgcttactcagactttaggaacttggagaggcccagtggcttatttatctaagaaggtggatcctgtggcctcaggatggccaagttgtttgccagccatagtggctacagcaagcctagtccaagaaactgataaattaactctaggccagaatttaacccttacagttcctcatgctgtagagacttgactacgaagtgcttcaggtaaatggatgtcaaatgctcgtattttacaatatcagagtttactgttggatcagccttgtttgactttctctcccacaaggtgtttaaatcctgctactttactcccagatccagattctaatactcctgtccatgactgtcaggagctgttagaagctaccgaaactggcaggccagatcttcaagatgtgctcctgagaaaggcggacgccaccgtgttcaccgacggcagcagttttctcgaacaggggatacgcaaagctggtgcagctgttaccacagagacagatgtgttgtgggttcaggctttaccggcaagcacctcagcacaaaaagctgaattgattgcccttactcaagctctccgatgggttaaagataaacgtattaacatttatactgacagcaggtatgctttcgctactgtgcatgtacatggagccatctactaagaacgcgggttgctcaggtcagaaggaaaaataattaagaacaaagaggaaattttagccctgcttgaagctgtgtggctccctcaacaagtggctgtaatccattgtaaaggacatcaaaaagaaaacacggctgttgcccgcggtaacccaaaagcggtttcagcagctcgggaagtggcgctgtcttcagctccgtccataaacctgctaccggcagtttcttttccacagccagatctgcctgacaaccccgcgtactcaacagaagaagaaaaactggctgcaaaccttagagcaaataaaaatcaaaaaggttggtggattcttcctgactctagaatcttcgtacccccagctcttggagaaactttagtcagtcacctacattctaccacccatttggtgggacaaaattagctcagctcctccggagctgttttaagatccctcatctacaaagcctaacagatcaagcagttctctggtgcacagcctgcgcccaggtaaatgccaagcaaggtcctaaacccagcccaggtcaccgtctccgaagaaactcgccaggagaaaagtgggaaattgactttacagaggtaaagccacaccgggctgtgtacaagtaccttttagtatcagtagacaccttctccggatggactgaggcatttgctaccaagaacgagacagctaacacagtagttaagttcttactcaatgaaatcatcccctggtacgggttgcctgctgccatagggtctgataatggacctgccttcacctcgtccatagctcaatcagtcagtaaggcattaaacattcagtggaagctccattgtgcctatcaaccccagagctctggacaggtggaatgcatgaaccataccctaaaaaatactcttacaaaattaattctagacaccagtgaaaattgggtaaaactccttcctttagccctacttagagtaaggtgcaccccttatcaggctgggttctcaccttttgaaattatatatgggcgggcaccacctatcttgcctaagctaaaagatgcccattttgcagaaatatcacaagctaatttattacagtacctgcagtctctccaacaggtacaagagatcattctgccacttgtttgagaagcccatcccagtccagttcctgaccagatggggccctgccattcattccagctcagtgacctggtgtttgttaaaaagttccagagagagggcctaactcctgcttggaagggacctcacaccgtcatcctcacgacgccaacagctctgaaggtggacggaattcctgcttggattcatcactcccacatcaaaaaggccaacaaagcccaaacagaaacatgggtccccaagcctggatcaggacccttaaaactacacctaagtcgggtgaaactgttaaattaactctttttatttgcttcttttgtttatccttgcctgtaatgtcttctgtgccttcctactccttccccctcacctctctcacaacaggacgtgttttcgccaatactacttggaaggctggtacctccaaggaagtcacctttgcagtcgacttgtgtatactgttcccggagccggctggtacccacgaagatcatcgcgacctgccagtcatgggagcaggaggtgtcgaccttgcagcaggatttggacactctgggagccaagccagatgtggaagctccaaaggtgctgaaaaaggactccaaaaggttgacttttacctctgtcctgaaaatcaccctgatgctagctgttgagatacctaccagttcgtccgcccggattgggcatgtgtaactttagccacttactctgggggatcaactagatctccaactctgtcaataagtcgtgcttctcgtcccaaatcgtgttctaaaaataattgtaaccctcttaacatcattgtccatgaacctaattcagctcaatggtactatggtatgtcatggggattaagactttatgtcccagggttcgatgttggaactatgttcaccatccaaaagaaaattttggtcccctggagcccacccaagccaatcggacctttaactgatctaggtgaccctatgttccaaaatcaccctgacaaagttaatttaactgtgcccccaccattctcagttcctaagacccagctacaaagacatcaactccaacccagtctgatgtctatacttggtggagtacatcattttcttaacctcagccagcctacactagcccaagattgttggctatgtttaaaagcaaaacccccatattatataggattaggagtagaagtcgcacttaaaggtagtcctttatcctgtcatgcacaacctcatgctttcacattaggagatgtgtctggaagtgcttcttgtctaattagtactggatatgacttatctatttctccttttcaggctatctgtaatcagtctctgcttactcccatgagcatctcagtctcttaccaagcacctaacaatacctggttggcctgcacctcaggtctcactcgctgccttaatggaactaaatcagaacccctcttgtgtgttctagttcatgtccttccccaggtatacgagtacagtggatcagaaggacaactcctcattgctcccccggaattacatcccaggctacgcagagctgccccactactggtttctcttttagccggtcttagcatagctgggtcagcagctattagtacagctgccctagttcgaggagaaactggactaatgtctttgtcccaacaggtagatgctgatttaaataatcttcagtctgccatagatatactacattcccaggtagagtctctagctgaagtagtacttcaaaactgccgaggcttagatctgctgttcctctctcaaggaggattatgcacagctctaggagaaagctgttgcttttacgccaatcaatctggagtcataaaagatacactccaaaaagttcaaaaaaatctagataggagccaacaagaacgagaaaataacacagcctggtatcaaagcatgttcaattggaacccctggttaactactttaatcactggtttagctggacccatcatcatcatattattgagtttaatttttggcccttgtatattaaattggttccttgattttgtaaaacaacgtatagcgtctgtcaaacttatgtatctaagaactcaatataacccccttgttgtaactgaagaatcaacgacttgattcccctaaaacacaagtggggaaatgaaatgcctaacggtgtttttactttaactcgttactttgaattttgtcctgcttgtctctttaatcacctaaccttgcttctcatgtaaataagactctctctagctaggaaagccagacaaactccaattgaccccttagtttacaagacactaagggctcctcacccaaccccctttcgtgaggagttggcctgggtaaacagatcctcagcatttcaaaggagcccaattaactgataaggtacccacaccaacaatgtatgaagttcccaggaattttctccaagagataacaacatgaaaccttgagtttgtgtccggcatagaccctatatctaattataataaaagatttagaaccttgcacctggtaccgttgctcttcttgtaaccatttgtcttttaagttgtttatcactctgtaactattttgattattttgattcttgcatgtttttacttctgtaaaattattacatttgagtccctctccccttcctaaacctaggtataaaatttactcgagccccttcctcgtggccgagagaattttgagcatgagctgtctctttggcagccggcttaataaaggactcttaattcgtctcaaagtgtggcgttttcttaactcacctgggtacaacagtgcagctggtggagtctgggggaggcttggtagagcctggggggtccctgagactctcctgtgcagcctctggattcaccttcagtaacagtgacatgaactgggtccgccaggctccaggaaaggggctggagtgggtatcgggtgttagttggaatggcagtaggacgcactatgcagactctgtgaagggccgattcatcatctccagagacaattccaggaacttcctgtatcagcaaatgaacagcctgaggcccgaggacatggctgtgtattactgtgtgagaaacactgtgagaggacggaagtgtgagcccagacacaaacctcctgcaggaacgttgggggaaatcagctgcagggggcgctcaagacccactcatcagagtcaaccccagagcaggtgcacatggaggctggggtttgtttcctgtcaggatttgggacttcctctgcttctgacagtttctctagggaaactctttaattttagatttctgtgcccaccaatgtcatctctacatttttttaatcattgtaatatgataggaggacttattctcacatgcacaatatgtatattgccacctacgggaatgaaaactcctcaaccatggtcaccagcatcagagtcgtgaggaagctcaggggtgcctggtgagtcttctccagtcagactcaggacagtaacctcaaggggattcccttgtgagaactcacacactttcatgagaacagcaccaggagttggttctaaaccattcatgaaagacccactccatgacccagtcacctcccaccaggtcaccccttcacaattgaggattataatacaacatgagatttggggcaggacacaaatccaaaccatatcagatacacattgtgaaatgctcatgatggtcagggtaatttgtatttctatcacctcacagcgctaccattttattatttttttaaattaactgcatgagtgagtgtctgatgagaacacctcagatataccctttcagcaacaatcatttttataatacagtattaactataggaccattgctgtacgttagatctccagaactcatccaacctgcacaactgaaactgtacaatttaacaaacatcacccgatttccctctcctcccaggtcctgagaccctctattctgctctctactttcaagagcttgaatattttagatcccacatgtaaatgagatcatgcagcatttgtctttctgcatctggcttattccactcagcatcatgtcctccaggcccatccgtgttgttgcaaatgtcagaatttccctcttttcaaagccaaataaaatacagatttatgtatacacattttctttatacattcatccatttacagtcattaaattattttgcaaatctacactattattaataatcttcaatgaacacgtctttggcaaagtaattttatttcctttgcatatataataagaaatgggatcaccagattatatgatagctttattttcaacttatcgagtaaccaatcctaccacagtgtattccctttccctcacattcttgccaatatttgtcatctattacatttctgataataaccatattaactagtgtgaggtgatatcgcattgtgcttttcatttgaattcctctgataattaggaatgttgagaaccttttcgttttctgtttgccatgcatgtatcttctgaaaaaagttatccaggtttttgcacttttttatcagttcatttgttatttgctattgaggtatatgggttatttatacatttagatagaccttcttgtcggatacataattacacatagtttttcctgtgctttgttgttaaattcaaagaaatcagttccgaattaatggcaggaattttttttgctccatgtgatttatgagtttatggcttcaggtattatgtccaatattagctgatttttttatatggagttagagaaggcctaattttatttcttttgaatatgaatgccagttttacaccattattgaaaagactgtcctttctctactgtgtgctcttggcacacaaaatcaggagagacataatgacaaaagaaaatatcagatgaatattcctgatgaacatagacctgaaagtcctcaacaaaatactatcaaatagaatccagaagcactttaaaatgtaatacatcatggtcaagtgggctttacccctgggatgcaaggctcgttcaatatccacagtaactgtgattcacaatgtaaacagaataaaagcaaaaaccatatgattatgtcaatagatactgagaaagcctctggtaggttctaacatccactcatgataaaaaccctcaacagactagacatcaaagaaacgtacctcagaataatagccatctacagcaaacccacagtcaacaccatactaaatgagccaattaaaacacttgtctttataaattacccagtctgaggagtttctttatagtgtgagaattgactaatacagcatccaaataggaaaggaagtcaatccgtccaccttcagcgatgatataattctatacctagaaaatcctaaaaagtctgccaaaataattctagaataaacaactttagtaaagtgtcaggatacaaaatcaatggacaaaaattaccagcatttctataagccaaccacatccaagctgagagtataatcaagaacaaaatcctatccaacttacagtatccacagagaaaatgaaatgcctgggaacacagataacaaacaaggtgaaagatcactacgaggagaactataaagcacagcagaaataaataataaatgatacaaataaatgggaaacatttcatgctcatggattggaagaatcaatattgtaaacattgtcataatgcccaaaggaattcacagattcaatgctatttacataaaactatcatcatcattcttcacagaatcagaaaaaaatctattctaaaatttatatggaaccaaaaaagaccctgaatagcagaagcaatcctaagcaaaaagaacaatgccagaggcatcatgatactgaccttaaactacaccataatgtcttgctaacaaaagcagcttggactggtacgatagcagacctgcagaaaaaaaaaaatagatcaaaattgaaaacagaaataaagttgcacacctgcaaccttttgatctttgacaaggctgacaaaagcaattggaaaaaaaaaatctctgtattcagtaaatggttctgggataactggattctggcaggtatgcagaatgcaagagtgaaggagcctgtgcagcttctacctagatttcagatgtgtagagagccctgcatgcccaggaagaagcctgctgcaggagtggatccaccacagaaagcctctactagagcagtgccaaagatggggaaagatggagttggagcccccattcagagtccccactagggcgcttcatagtaaagttgtgggaatgtggccacaaccctcaagaccctagaatggtagagctacaggcaacttgcaccctcagcctagaaaagcttccagcacttgactctcacttgtgaaggcagccccgtggtctgtgcctagcaaacctatagggattggctgcctgaggttttggggacccaccccttgttccagtgtgccctggttgaagtacataaagtcaagagagattattttgtagtgttaggatttaatatctgcagtgctgggttttatatgtgtgtgaggcctgttggttgttccactggccaatttatccctttaggattggaattatttacccaatgcctgcaccatcattgcaccttggaagtaaacaactttcatttttaaacttgcaagctcacagctggagggacattgccttaagactcagatgagactttggacattttagttggaggttgatcaacttaacattttgggaactattgaaaaaaggtgattatattttgcagtgtaagaagaatatgagaactttgggtctgagagtgcaatgatatcatttaggggttttcccctccaaatgtcatggtgaaatgtgacccacaatgttggaggtggggccaactgggtggttttgggtcatgaggagatttttcaggactggcttggcatccaccccatggtaattagtgaattcttgctgtattagctactgtgagatttgattgttcaaaaaagtctggcaaccctcctaccctctcatgtcccccctcctcaccatatgacacagcctcctccccctttgccttccaccatgactgtaagcttcctgaggccctcgcaagaagcagatgcttgtgccatgcttctcacacagcctgcagatctgtaagccaaataagcctcttgtctttgtaaatcacttggcctcaggtattaatctataccaatgtaaaatagactaatacactgcccaaagcaatatacagagtccatgcaatttatatcaagtaactaatataattgattacatatttttaaaaatcctaaaattcatatagaaccaaaaaagggtctgaaaagcaaaagcaatcttgagcaaaaagaacaaagctggaagtaccgcattccctgacttcaaattacacaacacaaagataacaagaaaggcagcgtggtaatggtagaacaaaaatcaagagcccagacatacagccaaatatctacaaccaacggttctttgacaaaactgacaaaaatatacactggagaaacaaccctctattcaataagtagtgctgggagaattagatagccttatgcagaagaataaaatgagacttctgtatcatcatagacacaaattaactgtgaatatggattcaatgtttaaatttataaactcataaaaattcctgaagaaaatctaaaaaaaatcctctagacatttgcctaagcaaataaaatatgactaagactgacttcaaaagcaaatgcaatgaaaacaaaattagacaaacaggattaattgaaacacagattgtctgcatagcaaaagaaataaccaacatggtgaacagacaacctgtgaacagtaaaaaaaaatttgcaatctattcatcaaagggctaatacatagaatctacaaggaactcaaataagtcaacaagaaataacaaataacttcattaaagagtgagcaaaaaccagacatttctcaaaagaagacacagacgtggccaaaacaaataaaacatactcagcatcaccaatcatctgataaatgtaaattacaaacaacatgatatagcatcttccaccagtcacaatggctgttattacaaataaaaaacagcaggtgtttggagagaagcataggaaaaataatgctttttatatgcttggtgaaaatataaattagtacaacctctatgaaaaacaatacagaagtttctcaaagaactaatattagaattaccgtttgtcccagtaatccctcccagtgggtatattcctcccaaaaggaaatttttatatcagaaaaagtcacctgcattcctagtgtctttcacagcaacgtgaatagagttgtaggacattagcctaaataaaataactcaaaaagatcttctcttttataattggaaagtaaacaatgggtacacatgtacatacataaaaaacaaaagacactgggaactgcaaaagagggcaaggtgagaggaatgtgagggttaaaaaatcacctactggctccaatgttcactagtgggcgatagttacaccagaagcccaaacctcacctttatgaaatatattcatgttacaaaattgcacatgtacaccctgattctactgaaaaaaacagaaataaaacatgaacagaattgttagactgctagctagatttgtcaacaaagaaaaatgcaaaaggagcaattctctgttttggaaccctttctcattttctggtacaattagaaattgtagactaatccctatattctcttctgaagccctagcattagccatttctcaaagacatgctggttccttttttttttttttttttttgagacagggtccagactcactgcaacttccacctcctgggttcaagcgattctcctgtctcagcctcccaagtagctgggattacaggcatgcgccactgtgcctggctaatttttgtatttttagtagagacagggtttcgctatgtgggccaggctggtccaaactcctgacctcaaaagatctgcccacctcagcctcctaaagtgctggaattacaggtgttagccactgcacctggtcactggtttcttttatagaagaatagtattaaaaactcaaatcttgattctgggtgtattttttattaatgtgcactcatttcttgtagaaattctcaggtaaaaaatctaggaagtatgtgttgtgtattaacccatatatacacagacatctaaactatttttatctaatatatgtacctatattatgctaaacttgcaaataaaatgacatgtccaccctaagttaataccacatggatgtttatcgcattccttctatgcctgacactaacctcccactccaaccacaaggaaccccatttccccatacgccgtccattctctttgtagtccaattccaagattcctgtggagtgtaacaagatgtgtaagttgtgctcttttgtggaacatcgtcaattggggtacaatgctgatgtgaagtttcttttttctttaatcttattgcctacaccatttctgaatctacttagtacctcttttgaattcatacatttgtaatggaattagacattttctatgttatctgcattccatcctggaattcctaatcacctatttttaaaaaaaattcttttgaagtaagattgtattagtcagggttccctagaggggcagaacaaacaggatatatatacgcacacaggatacacacacacacacacacacacacacacacacagagtttattaaggagtattaactcgtatgatcacaaggtcccacaataggccatttgcaagccgaggagcatggaagccagtccgagtcccaaagctgaagaacttggagtcccatgttcgagacaaggaagcatccagcacgggagaaagatgtaggctggaaggctaagccagtctaatcgtttcatgttcttctgttgttgttgtttttttttccctctggccacactggcagctaatgagattgtaccacccagattaagagtgtgtctccctttttgagcccactggctcaaaagttaatctcctttggcaacaccctcacagacccacccgggatcaatactttgcacccttcaatctaatcaagttgacactcagtatttagcattacaagtccaccccgtcaacttgaaaccatacacatctcctgagattatacataatcttcaaacaaagacaataataaagtcataattacacctaatataatacaactttattcgttcaactggaaatgcaccaatccccaatccaaatgctattacatatggtccactccctcaaggacacagccaggatcatcctatgacttggtgtctagaagactcatgcacttttaattttacctccaatattagactccactttatcacatgcagacactgcagaatattttaagacatcgatgtcttatgctgaaaaattcaacagtacataaaattgccttcccaccacagccagtggttactactgaataaggatctgccatcccctagggaggtgctatagtggatggtgtgcactgttagtagctatggaaattgatccattgtggcaaatggcagcatctttcttttataacattaaaccatattatattgtatacacataccacattgtctttattcatttgtctgtatgctgaccatcagatagtttccatatcttcgctgttattaacagtgtttcaataaacataggatgcagatatgtttacaaggtggtaatttcatctacttgggtatactcccagaaacaggatttctggtcatataatatctccagttttaattaatttaggacgctttatgttgctttccataattgtggaaatgtagaatggtatagccattatgaaaaacaattttggttttgagttatgatccataaacagcatttgcttatggctctcaatgagagtttctactaaatatgatggaaggccaggaaggattctcaccttaaagcttggatggattatgaatttacctcttatttcctaaaagcaaaagtttggaagcatacatgatggaggctgttggcaggtttcaggatgatctcataaaaggagaatctgctggataaaaatgttgggttttcagttatagacacacctacactcaatatgaaatgatgaagtcaactgaggatctagaacatgttcacttgaagcaacagcacattctcaaaggaacttattgctccatcacaagggcgatgaacttctgaaaccagtaaagtgtgagtgcacagtaagtgataacgttatcacgtttacatgaagtttgtttaatgtgccaaaggctggtacagattaatcttacacaaatatatgaaacatatttttccatacatagatatctagaggataatcctcttagcaaaacttcttcaggttacagaaatctgtgtaagttgtagatctcatggggaactgtctctttataaatactggtctgtttttcaagtcaggaaaaattatctctgttggagtaggcttccaattgtgtagacttctgaattgcttcttgagttgtaacaaatgaaccaaaaaatttgactaattggagttttgtggctgtcttaataaaaatttcttataagctttctttcaattatttgagaccagttttcctgattttatttttctccaatagataaattttcacaagatctcaggaaaccacctctctggctctttagtttaaaagactagcttcttaggaaaagaagcttctttctaacattgaagagctcatttattctgcaaaccatgaagtttgagtctcattgtcaagaatcatgaaaatttttactccaatatactgaaagtcatgactcttgaattcaatatttattggcattcacaaaagtgattcattctcagatgtgtcctatgttgctggcccaacatatcagtgaactgagtatcctcccttagctctctctgtctgtagcactgagtctacaatcttcagagtcatccatgaaggggagtcctgaggttcatgggattcttgtaaacattcaggtcaacagaagaaataaacaggattgagggctgccagccatttccacgccattaggaataattaccatctaagtataaaggtctacatcatacagaataccccacaggataggctgatgcaaaaaattccaaccccacagaggctccacagcaacccttacagttctttcagggaagaaataatctccaagttaaatgagtcagtaaagctgctctgagctacaggaaaaattggatttggcccaggtttgtctgagttcaacgtgattattatactcagctcctgctccaatctggactgagtacggggaatttaaatgagcctggctgtgtggtttgttatatgaaaatctgaactatataaacataaatggcatgtctggactagcatgagggtgagagatcctgggaactccaccccccatactcttatcgccctttcctccaggaacctccaggttctcagggtgagaatccacatagatcccttcatggctctatttctaggaaaccaaatctctaataaatacacccagactttcttcagacacagaaaccatgggaaaggcatctttagatcctcatctatgtggggaaaggtaatccatccccattacaagcccatactagcagccttcctttatcatgaaaatgggtaaaattagccaatagatgtaaatttaaagaaaatttcctgtgatgctccagccagaaaagagcaaaaatcagcttcacttctggagacttcccgtataggtcacagcccagagaaagaagatcaccacagcattaaaattcagctgtaagaacatgtaatgcttccgtgttccacacattatgtctcaccagtttagtcaatatggattaaatacgagagtgtggcaatgcacaaactctatctgaggaggaaataggagaaaaatgttaaggaaaatagaagaattcgaagcctctaataccaggaacttcagcacaaagaaaatgatttcacccttattggcctcaaatttatttttcctgtggcatctgcagggttccaaagtgagaaaaattaattcactgtgcatgcacttccgaagtgtccacttgcattctgatatctttacttctatttgcagaaagtagacacatattcagccttagtgccagtgtagggagtgctttccgtgacatggataccagaaaaatagggtaaacatagggcccattaatgtgaaaatcagacattgtgtgtgtgtgtttgtgtgtgtgtgcgtgtgagttgaatagtagagttggagtgggcttctatccacctacacctgcaggtattctcaggtgccataatcaactgcaggaccctaaaggaaataagagtccccccaaacccctgaagagtttttgggttcaccgtgtgtccaatgattcagtgcctcttgagctccaggaaagggctccccagtgatgcatgagatctttcttggggtctccctgcagagttcactgggattcctaaggccaattcagtatttcaaaagatggtgtgagaagcacaggctgtcactaaaggagaattctgagccagggcacagccactttatacttggctggggacactggtaggaatatactctgtgagatcagacaggaacctccttgcaggggcagggcagggctgcagggggcgctcaggacacacagagcacaggcttccgccccagagcaggtgaaggaggctggggaggggttcctctcagggcctgggacttcctttaaaaaatctaaaataagtatttcacaaggactgccgatgtttatataaatatcctattcaattgtgagcatttatgaaactcgatgttgtaatgagaaccacttttacaatgggaatttcaaacttccctagacatcttaatagtaagcagctggaggtcaggaggagatcctttcttataaataagtgcaatttttggagaaacacactcattcccaaaatagcacattcacatattaaggtctagaaatgattcgagttgcccctgagacagtcaaatgtgggttctaagtgaggtgcgtgtcctgggggagcttgttctccagtgggggaagctctgtcaacacagagttcagggatgggtaggggatgcgtggcctctaacaggattacggcttgaaccctcagcttctacaattgtgtcgtccatgtgtcatgtatttgctctttctcatcctgggtcaggaattgggctattaaatagcatccttcatgaatatgcaaataactgaggtgaatatagatatctgtgtgccctgagagcatcacccaaaaaccacacccctccttgggagaatcccctagatcacagctcctcaccatggactggacctggagcatccttttcttggtggcagcagcaacaggtaacggactccccagtcccagggctgagagagaaaccaggccagtcatgtgagacttcacccactcctgtgtcctctccacaggtgcccactcccaggttcagctggtgcagtctggagctgaggtgaagaagcctggggcctcagtgaaggtctcctgcaaggcttctggttacacctttaccagctacggtatcagctgggtgcgacaggcccctggacaagggcttgagtggatgggatggatcagcgcttacaatggtaacacaaactatgcacagaagctccagggcagagtcaccatgaccacagacacatccacgagcacagcctacatggagctgaggagcctgagatctgacgacacggccgtgtattactgtgcgagagacacagtgtgaaaacccacatcctgagggtttcagaaaccccagggaggaggcagctgcactgaatttgaggagattacagggcttacaatgtttaaagttgtttagaaaatgagctgagcaattgaggaatgtgagtaatggaaacatggatgcactctatataggaaatgtttctttcaacagtcaccctatatgcaaaattcagaatggtaaaggcagcaatcagtgaggctgacgcaaatattcccatggaggccttgtgcagacatacgttttaaaatcagatagataaataatttggaacaagattgctggtaacgtggctaagactaaatatgattcctaaaaactggccaaaatctattccaaattgtctctgccactccttttacataaatgtattaaaaagtagttttaagaccacagcaaaattggacagaaggtgcagagagttctcatgtgcccctgcttcaccatgcacagcctttcccactgtcaccatcctgccccagagtcatcaataagttacaatggatgaacttacatgggcggattggttctttcctcttctggtggtctcttggcataccaagcccaaattatcttgaagcaccataggttctactgtaatgcctaaccttgttttttactctagtttgctactttaaattttccctttttttgtctccttaattgccagccatgtttcccatatgaatagactctccctggctgggaaagctgggcaaactccatttgaccttttgatttataagacattaagggctccttacccaacccccttcttcaaggaattaacctgtgtaagcagatcctcagcatttcaaaggagcccaattaactgataaggtactggaacaaacaatgtatgaagttcccaggatttttctcaaagagataacaacataaagccttgagttcatgcccagcatagcatcatatctaactataatgaaggatttagagccctgcacctggtaacgttgctttttgtaaccatttgtcttttaaattgtttatctctctgtaaccatttgcttcttttgattcttgcatgtttttacttctgtagaattattgtatttgagttcccctccccttcctaaaccaagatataaaagttaatcaagccccttcctcggggccgagagaattttgagcgttagccatctcttcggcagccggcttaaataaaggactcttaatttgtctcaaagtgtggcgttttctctaactcgtttgggtataacactacaagtgggttcctgggaatgatgccagttcagaggaaaagtgggtggggctattcatatttgggctcttttttagaagattcataaaacagatattttcctatacgttctgtgactcctgatttactatcccttcccagagggtaaggtccctaagtgttttgcggtatatccatgtctatggaaagaaagcaagttctggtgaatcccataaggaatgtcctttgatgagaagtggagaccttggtcatgaggcacatcatgtatgattttctataattccgttagattcactgtaattttggggggtgtcctgtggaatgggtcttctgtgtccctgcatgttcagctatatctgtgtggtgccacttacacttaatgagatgagattcctgctgcttgtatcaggtcactggtgatctctgaagctgcttctggtttctgctttaatatgtaaagagcatgtcaaacatcacccacattcttacaataataaaagcctggaaaattgattatcaataatttcttgaatctgttgaagaaatgaaattgcagggaaaaccaggacccccaaaactagaaagacattaaaatagagataatcagactgatggatcaaagttctgtggcaataagataccaaattataaacaaggcctaaagtcatggattaagtcactcacccctacacttaaaaaaatgactgtactgtaacttccacagggcttttttgttttctgtagcacctaaacaagcactggttctgaggtaagcatattaaaacatttgcagctcatggaactccaaacgtggtaactgaccctctcccacaagccataaatagagctttgtttggacaagagacagatttcagtaactgtcttctgagaagagactactgaccatgaacttgtcctggcaatttacagagactgtgcagtgtgtgtctttctgcctctgcacaaagcccttttgatgaacagggcccgattgtcattcatttagttcttaagtcctcatccccaaagcaaacactaaatgcatgtaacatgtgtgtttgcttattagacatgacagcctgcccactatgtgaacatcaacagatccttctatagcctgctgagtgtgtacacttggccaatccatttgcatgaattcatttctcctctttccctctcttgaagtgcctgctcactgtctctgtgggaggctttgcttcccagcctgttaaggtggctgtcctgcagctttaaccatttctcagaagtaaagtctcctttctaaatttataaattatgtgactgttccgttgaaagtgcaagctggtgggaacagttacatggtaattcggtaaattgctggtggacaggtgtggacagggatagggtaagaactcctgggggctgcacaccccacacttcgatggaatttccctccagaaacttctgggttctcaggatgataatccaaacagattccttcatggctctgtcatcaggagagctactctctgataaatatgctcagaacttcctccagacagatcctacagagaaaaaatgcttttcaagatctctattctatgtgaggggaaggtattcttttccatcccaggcagtttcatcttagccttcctgtgtcataaaaaggtcaggttcaagacaataatatgtggatgctgcagccaggaggggggagtagaagacggaggaaaatcagctgcaccactggagactccttgtaaagggcacagtctagagaaaaaacatcaagaaaacattgaaattcaatttccagtacatatactgctcccctgcccaccacatcacctcttcaccagtatgatcaatctggattaaagagaaaagtgtggcaatgcacagactctgtccaaggactagaccttagggaaaccaaaggcagagggagaggaaaagttaaggacagtgaagcggtttaaagcctctgagaccaacagcttcaggaccaaggccacggcccctctgtcaatggccttagatttacctctcacggggcatccacagggttcccaggtgagaacaggcaaaaacaaggtgaagacactttccaaatctccagcagtactgagcttgctttagctctgtttgaagaaacaaaacaacaacaacaaacaacaacaaccgcaaatataaccaggattaaggtcagcgttggaagcacttttattaatttttttaaattttttatttctcagatggggtcttgctctgtctcccaggctggagtgcagtggtgcggtctcggctctgcaacctccacctcctgggttcaagcaatcctccaccctagcctcccaagtagctgggattacaggtgcatgccacggcgcccagttaatttttgtattttttagtagagacagtgttttgccatgttggtcaggctggtctcgaactcctgacctcaggtgatccgcccaaattggcctcccagagtcctgggattacaagttaattgagttaataaagctgttctgaactatgaaaaacattagtttgctcccagattttcttgatttcagtttgattattatattcagctgctgccctaatatgtttgagcatgttactatttaaatgaccctggctgtttgatttgttatatataaatctaaactaaaacaacttaaaggacaggtttgtactattattaggatgagatattctgggtgcccctcatttgctccatgaacctccacatttttaatttagaattcacataaattccttgtgagttgtgtcagtcatcgagagacctaatctctaacacctttacccagaaccttctccagatagaccacccacaggaagaacatttatagtaatttatctacatggtggaaggtacttcactgccattgtagaaccctcttcccagccttcctttatgaggcaaatgattgccagtatggtaagattgaacaaaaggatgtgccagtagggtaagattgagcaaaaatagtcctgagatgctgcagacagggaaggacgtaatagacaaatatcagctttattagaggagactccttgtaaaggtcatagccaagaaaaagaagacaaaatcactgagattaaattctaagaatcttggtccagttcaatcaagccatcaacagccaggtggcttcagtggccactatgcatattaccccatgcctaaatgttctggcttgtacaaagagcttctctgtaaattgcacattgccatagtggaagatggcatgggagattttgtgacaaacacttaaggtgcaataatagctatttttcctttatcatgacaatatgtggcatgcttctagattcatttcatgccaaagaagttcctcagaagggtaaggaaatggagaatcttacatggtccaatgcagtccccaagaagggactttgaatggacagttacactggttactacaatgttgtctctgaccttctcaggatcgaagatagtcatgagtatcaaggtggagatgggtctaggtgagagaaaaggaagtagtggttcttgagaagaatggtatggccaagataagcctgaactatctctcctcttccagttcctgcaacttcatattgcctgattgaggtcacttgcctatggtggtaatgacatcagcaatgcaataaattctctggtggctttatatctggtttataacatgggagatgtttcctcaagagtggtgatgccagtgtggcttctgctctctggtggtgttggaatctgcattagtctgtgggtttggaggaaggagattcaggccatggggaagaatctgacactctcacaccctctggtgccttcggtactggactggctcctgccctcactatggtgattgcatcagatattggcctccccaccagtacaacacgttgtaacatgggctcctttgtacctggctttaatccaagaaagttgtcgacttgactctttcgtgacattgtatagcctggtttgtcacaatctttatttctggaattatcagtgctgccatcttggctgtcttcaagtatgtcatcctcacagtgtgaagctgtttgacattaacatttttgtcaatgtttgggactaccttacatattccggctcagttcaaaatgagctatgtaatgtagccaggtttccactgagttccactttgcttcttggctgtctattcctgcgcaagtttctatgtattttgtatcaggcttcaattccattatgtttaaaatgttgtctctaaagataaacaaagatttttttaaaacaaccaaacatgcagccatttgaccgagtgtggtctgcattgttagtctcaccatcttctgccctaacaagcaccgaatctaacaacacaaatatcatggaagctttccttggagtagctcctgtaattagaatcattgtattctgccctcctgtcagtggtggaacgttctattggcacatgtggaaacctcttagagggacgagtttctttgaacacaataaaattttaagttaggaataacttatttgaaagcaattcattgaaggttattgctaagaagaagttagaaacagtcttttggcagtcatttcttcaagatgtatggcagtgtgggagggatatataaagtggaataggaacttgggctagttaaatggaatagcctccaatgttaatctgtttaccttttaactgaatgaaaaagcctatagttgtaagaaaagaaaaaaaacacaatcctcacacattcccttcccatcagcattgaagatgagtgtggcaatgcagagactctatatagggaggagaacatagggaaatgcaaagacaatgggagaaaaaagtcaaggacagtagagcaactggaagcttctgacaccaacagcttgatgaacagggtcactcaacccttggtggacacagagtcacttctcttagggaaactgcagtattctcaggtgacaatatgcaaacatgatgaatgtacacttgctacgtctccagttgtgtactgttttccttacttctgtttggagaaggaagtcatatactcaggtctagtatccgtgtagagggtgctcaccatttgcaagatactaggaaaaatggcaagttagaggcccactgttgtaaaaatcaaccagttctgtgtgtgtgtgtgtgtgtgtgtgtgtgtgtgtgtgtgtgtgtgttattgaaaaagaagacatggagtgggcattgatccacaagtatatatacctacaggtattcttagatgtaatattcaattgcaggagaccaaacaagataaagcatcccccaaaacccttgaaaatttttgtgctcactatgtgtccactgattaaatgtatcctgagctccagggaagggctccccgatggtttcttagagttcactgggtctcctaaggtcaatgttttcaaaagatggtgtcagtaacatatggtgtcactgaaggagcattttaaactagggcatgacctcttcctatagccctagagacactgagagagaaatcctctgtgagcccagatggaaacctccatgcagggcagaggcagtgctgcagggggcgcccaggacccacccagaacaggctccagccccagagctggtgcacaggaggctgcagaggggatttctcccagaattgagtgttgttttattgaaaaccaaaaaattataacatgttaaaattagaattttgcaaagactatttctattatctctatacatttagaaataaacaaatcaacaattcagtgagaaccacatttaaaaggcaaaattgttacttgtttgagatattttcctagtaaaaagatgaagaacagggatggttttattaaatcaaaaggtacacatttcagaagacacagagatcccaagagtaagactgcagacagcaaagcctagaaagggcggaggctgtccatgtgccatgtcctgtgtgagtcaccttcttagtggagaagttctcccttcacaaagttttgggcatataaagggaaacacgacattaaataagaacgaggacttgtacctcagcatcccacagttgtgtggttcatgtgagatctattttctctttctcatgctggatcaagggtaaggctatgaagtagtagttctcgtgaatatgcaaatcacctgaggtgaacactacagatatgtctgtgccctgagagcatcacccaataaccacacaccacaaagacactcgctgagaagagcaaccctaagacacataattgtcagattcaccaaggttgaaatgaaggaaaaagttttaagggcaaccagagttgtgccatggcacagtgttgtgccatgtcctttctctgttttcttgcctgtttatttatgtcagatgtgccacctacatggaataaggtcagaattctgcctccagtaacacatcaaaggtgacctttgattgtacttttggtttatgctccaaaatattgattataaaattcatcaccgtcatattttatgtcaaaataaatctgcataatctgaatgtcagtacattttggaatctattaaataactgaaattgcaagaaatattacccactccaaaaactggagagatgggcatgtccagaatggcagttagcacttgcttacctggtgcagaaactgcagaagccacaagctgttgagggcacttacatggtaaccactacggacgtctgaaagacaaatgtggactcggtaaatgtgaccgttccagagggtcttatacttctaaggtttctggactttctctccagaaacctccagattctaaaatatacaatccaaataaatttccgatgggtcagaattgaagatgaaatgaagatgattaattacagagaaatataccaggagcccacttcaaaagcttctaaagggaatgacttttccagaaccttatcctatgtgaaggaagacaaatctcccattccagattctcccccattcttccattattatatgaatgagtaaagttagccaaaaggggtaagacgtacataaatagtccagggaggccgaaacctcaaaagggagtaacagccaaaaatgagcttttcccctggagatgctttgtcaaggtcacagcccagaagaggaagcctattgaatctctaggtttccattggaagaacaggcagtgcttacctgcactgcacaatccattctaactaggatgatggctatggattaaagatgaaagtgtggcaatgcacagactccatctgaggagaacacagaaatactaagacaatggcagagggtgagacaaagacagtagagcaatgtgaagcctctgacatcgtgatttttaagaccaacatcttgtaaatgccatcatagttctcagcttcttttattatgggacctttgctggtttcctagctgagaaagtgaaaataacaacctgcatggacttcccaagtctccacctgtatcctgtttgctttagatctctaggagaagaaagtcagataactgggcctggtgtcagtgtaggaggcacttcctaaaagccacatattaggaagaagggaaaatgtgtgttattggaatagtggatatggagtgggctttcatctgaatgtatctgcacctgctagtattctcagatgcaacattcaactgcaagagcccagtgaagaaacatggcactcgcaaatctcttgtaagtttttgtcttcattttggttccactaatgaagtgaatctggagcttcagggaaggggctccctcctgtgtcattgaatccttgctctgggtctccctgcagagttcaataggtttagtaaggctaatcaattgtttcaagagatggtgtcagcagcatatggtgtcactgaaggagtattctacactagcacacagccatttcatgctgggctagagaagcctgggggaaatgatttgaagtctcagcaaggaacctccttgcaaggcaggggctgggctgtcgggggcaccgagcaggtgagtcagaaatcaatatgtaaagatgaggacctatggatatgaattgaaaatatataaatacttcaaaaaattccagtaaattgagtccaaaattaaccccaaattattcaaaacacaaattccttgacaattattttgggagcagtgagttcataaagaattcaaaactactgtttcagcttctgattcttattgttcctgagatgagaaaatcatctctaatcacacatcacacagcaaatctgtaaacaagagtgtttctatggaagatcctgggggatctgaacaccaggcaggtgctggagaccctgtttcaggagcgcccagcagatctcagagggacctgctggtcactcacgtgggacatcagcagtaactttctcagtcaccagtcagctgtgctggtgactgatggacccaggacagaaccaaggcacctcctcagtgtcatggagagtgatggttccagaaatcatccaggtgctctctgtgcttataaaatgtaggttcactgtgaggagcgtgttctgagggggattgttctgtgaaaggacctctgttcacgagtgttcataaatggagcagggcatgcatttcctcaaacaggaatagcgcttggaccatcagcatctcactcttgtaaatctgatgtgtcatttatcttccctttcttattattgaccaggctttgcgctatgaaatgctctgtctcatgaatatgcaaataacctgagatccactgaggtgaatttggatgtctgtgccctgagagcatcacccaacaaccacatccctcctctatagaagcccctgagagcacagctcctcaccatggactgtacctgggggatcctcttcttggtggcagctgccacaggtaaggggctcccaagtcctagtgatgaggaggggattgagtccagtcaagggggcttttatcatctcctcccttctcctcacagatgtccattcccaggttcagctgttgcagcctggggctgaggtgaagaagcctgcgtcctcagtgaaggtctcctgccaggcttccagatacaccttcaccaaatactttacacagtgggtgcgacagggccctggacaagggcatagtggttgggatgcatcaacccttacaatgataacacacactacgcacagaagttccggggcagagtcaccattaccagtgacaggtccgtgagcacagcctacatggagctgagcagcctgagatctgaagacatggtcgtgtattcctgtgtgagagacacagtgcgaaaacccacatcctgagagtgtcagaaaccccaggaaggaggcacctgtgctgacacagaggagatgacaaagattattagattaaagattttcttagaaaatgacactaagtcattaaagaaaaggaacaatattaatgtgtatttgagaaattttaattatttgagagatttttcatacagcatttattctgtaaacaaatttcaatgattacagaatgaatcaaattaatgaaactaatacagaacttcctctgaaggtatctttgtaaacattaatttcttaatcagtgctgtaagtattttggaacacagacacaaaatcacattttaagtctgcatttatgtctattaaaaatgccaaaaaaatctccttttgtgcatgtagcattttgaattcccaccatcaatgcatgatagttcttggttttccacattcatattgtcatgtatccttacgagaattgtgtgttttaaccaatctagtaggtgagtaatgggatctaatttttatttaaatgcacatgtccctccaaaagttcatatttaacaattttcgtataacttctgttgagacgcctctcctgacattcggttcattttaactgcattgcttcatttcgattcattgcaagttgacttgcatattgtttataaaagtcatttcacaaattaaaagaattcatttcacaaatatgtgacttggaagtattttctccaagtctgtggctgtctttattcccttatcagtgtgtattgcagaaacatatgtgtgtgtatgtgtctgtgtgtgtatgtgtctgtttgtacaaatttagactcaaaaacatgtaaaattgcattcattcatagatgatgtatttggcaatatatatgaagtctcattataaaatacactaatagtgattattttttccatgtctctcaactcaggccacaatcaactcatgagtgtttaaacttcatctacttgattggaggactatccatttcagatatttggaatacttctgtaaggaaatgtgttcgtcttcccaatatttatttatataatcatctattaatatgtgtattggtttatgaatatatatttcatactctgaagaagatccatgctatattattcattttatcgttcaaatcaccacagctttattaggtcctgggagctcatttaatttggatcctgtatccttacagcacacctcatccttttgtttttgaatacttccctgtttccttgtattacaataaattctaagctcattttctatattaccttttttgtacatagaattagccttttttctaaagattgcttgtttctaatgttaacgaatagcagtaaaataaaaaaaattgtgataccgtgtacaattacttctaggacctctcaacctactggcctagtagacgtgcatgtttatatgaacccatgtttgtggacgcatcaaaactatttatgtaactaatcttctgtaactttattatattaaaaatgagaacacactggtctcctgacccaactatgctaccacatggacctttctagccttccttccttgactgtccataaccacccactgcaaagtgaggaatcctatcctaccaactgccttattattacctagttgcacaattttaggacacatgcatagcggtatcagaaatgtaaagctcattggaaatatgtttatctactagaatagagtgttatgtgtagtttctttacattttaaacttatagaatttcctcatttccaaagttaattagattagcaacttcattttctactttctttagtgaagtcatttcaattacattatataatatcatttatttgaaattcggtataaaccaaaactatagtcaagtaaacagatagaggatattcaaggaacttagagagtgagtattaaataagtacaaatggcactgtttaagaatagtaaaattatttttagtgatataaaatggttgagacacgatgcagttaatttgtctaagctcataaatgtgtgatggaaaatataaacctaaatatatacaatttttgtaaaaagtatttagcagttcattaaccccaggattaaatgcagactgtatcaagttatctaataacttatttggtgagggtggggatgtcatgagatgcatgcaaaaaagaatgaagtaattttcctcatttgcatttaagatgttaccattcactaaagacctttaattttaaaaaaatcaattttctacgtgacccaggttttttcttcctgacgagcaaataacccagataattcttttctttccttggttgagaaagattttccccaaacttcagctcagttcaggcacacactgtccctgaatgggcatttaccctcagatgggtaacacacctgtcaacatggggactcttctgtcagacaaacacacctttactcacgtggattcttccctcagaccaacacacctgtccccacatggactctttcctcagaccaccacatatgtccttacatttactctttcctctagtaatgacatttcctcaagtggactcttgtctcagacaaacaaacatgtctgcatgtgaactcttcactctgataagtacaaatatttccacagtgactgtttcctgacacaagcacatatatccaatgttgaactgttttatggcaaaatgatctcaagataataattataaaatccctcctgacaaggtgtagatctgcatttttttattgtaccttaactttgccttattgtcaagaacaatagtttgcagctctatatgcaccgattagagattggtgtccattttctctggaaatgtatttttatattcttactggatgtatttttttgataatgtttgctactgtgaagatacctgaacagggtccacactagaaaataaaaaagactaatcggcagattaaccctgtgcatccagacccacgagtcctttgatcctgcccccctgaaatggagacacagaggacagatgagcaatgctgagcggtgcacccaagaccacaaaaagaaagacaaggaaatgtgtcccctcccctcctcatgaaaggcagctcatcccctgttccttcaggccctggtgaggagccaacccatgtctgttcccttcctcggtgtccacaccatggggtctgccctgatttgggcttcccttctcatcaccctcaatattagtgtcccttgtgaatcaggtccagctgcggctgctccacatggggccgttcttccatttcctctgtgtttgcagaagtcctgtgtgaaatttactgatagagtcaggggggaaaaattgtacagcccagtggttcactgagactctcatgcaaagcctctgatttcacctttactggctacagcatgagcttggtccagcaggcttcatgacagggattggtgtgggtggaaacagtgagtgatcaagtgggagttctcagagttactctccatgagtacaaataaattaacagtcccaagtgacaccttttcatgtgcagtctaccttaaagggaccaaactgaaagtcaaggacaaggccttgtaatactgtgagagacacaggagagggaatatctgcgtgagcccagacagaaaaatctctgcaggaagacaggagggagctgcatggtagatgctcctcagaaccaccagggcaccttggggacaacctgggggcactcagaaccaccagggtgtgcttaggaccacgggacactcaggatattagggggtgctcaggatcacgagggggcgctcatgacaccaggggacactcagaatcacaagggggcgctcaggacacgagggtttgcctgggaccaccagcaggcactcaggtcaccagggggtgctcaggaccaccagggggcgctcaggacaccagggggcgctcagaaccaccagggggcgctcaggacacctgggggcgctcagaagcatcaggggtgctcaggatatcagagtgccctcagtaccacgagggggcgctcatgacaccaggggcactcagaaccaccagggggcgctcagtacaggggggttctcttaggaggcagctccaaatcagaagcctgagaggctgtggttttcttttaaaccttggtgattcccgacctggtcaagcaaaagtcttccccaggatctctcaccatttcttccttgtaagtccatgattacttttacctacaaaacattaacttagaacaggaatttaattcaacttttaatgctgcatattttccaagtaatactagcaatgatctctcaggacaatttttacaataggttatttatatattttcttgattaaaaataatactattattaaaatagtaaagttataaaaatcacacctgtaatcccagcactttgggaggctaaggcaggcagatcacttgagctcaggacttttagaacagcctggcagcacagtgaggtcttttctatatatatatataaaataataataataataataaatacctgggtatggttccacctgtggtagcagctacttgaaaggctgaggcaggaggatcccttaagcctgggaggttaatgctgcagtgagctgtgattgtgccactgcactccagcctcgttgacagagtgagaccctatttaaagaaaatgtatatcctcaatacaaactgtttcaatgattagagttttgtatttttgtgctgtaatagtcaaacaattgtacatgttttttaacattaactcagcatatacatggtattttgtttatttttctttcatctgctgtttttggaaattaaacacgactttaaatgctcttgttctccattttggttggcttcaggtgtcctgtttttcagactatttctccatcttccctttctctttgaaagtattttactttcctcagtctccatgaaggaaaaagaaagtccctttactttctgacctccaagtctggtgaatcagttctcttctcttcataatcactgaagccaaccaagtttagaggataatggttctccttagaatatgctcgtctacctgcagactctctgccctaactcacccttttccagggtcctgcagaccatctcctcgtttccctaagtaccacagagtgggctctgcagctcctgctgccctctgtgtgctcagccctggggctcactagtgttttgatgatcaagtccaaatccccatgtgcttggaccctctgagaccaccctctaggaagatgccattgtgagtgagccctgaaaatcatggactgtgttcagtttcatattcctggatgttctctgttgtaaaggaatattgacaaataaatactagagtttgtattgaatattcatgccaaaaaagttttttaaaaatttttcaaatgaaacaattttatcttgcctagtttgaaaactacaatctaaatttaacaaataatgtaatacaacgtttgtcctattagttattcaatttattaaaaacagactgatatttaaagttaataccattgcacatttgagtgacatatttggcaagaacagcatttacattcagctttaacaaaacatgtatttaaatatatttgtctttttagtattggaataggcagacatacacgtagaagagcattattttctactacaacctcaaactgcaaacacaatttaaattcaattaagtaattaaaaaaatatgaaacaaatgggtgtgctgttttggtgtttagatatacattcacttttgcatgggcacatgtatgtgtctttgctgggctgttgtgtatgtatgtgtgtttgtagaaccatgaagttttcaaatacatcattaaatgacatagttatattaatcttggccaggcatggtggctcaagcctgtaatcccagcactttgggaatcttaggcaggcagatcacctggggtcaagggtttgagaccagcctggtcaacagggtaaaaccccgtctctactaaaaatacaaaaattagccaggtattgtggcacaagcctttagtcccagtgtggcagggaaatgtggggtcggaaatcccacacagagtttctactggtgtaccacctagtggagctgtaagaagaaagccactgccctccagaacccagaatggtagatccactgacagcttgcaccatgtttctggaaaaaccacataccctcaatgccagctcgtgaaagcagccaggagggagactgtgccctgcaaaagttttttaaaacttttcatttgaaaagttttaaaaaagttctgtcacaggggcagaacttcccaagaccatgtgaacccacttgttacatcaggtaacctggatttgagacatggagtcaaagaagattattttggaacattaagatttgacttcccagctggatttcagacttgcatgggacctgtagtttggaccaatttctccatttggaatggctgtatttacacaatgcctgaactcccattctttctaggaagtaactgacttggtttttattttacaggctcatagatggaagagacttgcctcatctcaaatgagaccttggactgtggacttttgagttaaggctcaaatgagttaagactttggcggactcttgaacaggcatgattggttttgaaatgcgatagcaatcatgactctagaggaccacacgtgaagtgcaacaagcaggcgcagaagacaagtgattcgtgatttcactgtagtttgtttaaatggtagactcacagaagtagaatagaatgttggttaccaggggctggaggggtggactggaaaaggagagattgtggtcaaagtgtaaaatgttccagttagacagaaggagtaagttacagtgttctaatgcacaagatggaaaatatggctgtgaatgcattatatatttcaaaatggctaaacatgcaaatgttaaaattttttcccactaagaaattatacaggtcgggagcgggggctcacacttgtaaacccagcactttcggaggccgaggtgggtggatcacaaggtcaggagttcaagaccagacttgccaagatggtgaaaccctgtctccactaaaaacacaaaaattagccaggcgtggtgttcaccacaggagaattgcttgaagcaaaggctgcagtgagccaagatcgtaccactgcactccaaccggggtgacagagtgagactcagtctcaaaaaaaaaaagaaatacatttatgaggtgctggatatgttaaatagcttgattaacaattccataatgtatgcatgtatgatagcatgtgtgaatggacctgtatgaaggtgaggtgccctggtcacgtgacagtgaggtgacttgggggaggtgtaaggttacctgggggtatgtgtgcagtgaacttgggcacatgtgaggtgacccagggtgcatgtgtggtggcctgggtgcgtgtgaggttacctggacatgtatgaggtgacatggggaattcgtgaggtgacttggatatgtatgatgtgacctcaggcatgtgtgaggtgacctggcggacgtgtgaggtgacctgggggacgtgtgaggtgacatggggaatgtgtgaggtgacctgggggaatgtgtgaggtgacctgggagcattcgaggtgacgtggggggtgtgtgagcttagcaggagtgtgtgtgaggtgacatggggtatatgtgaggtgacccccctgacgtgtgaggtgacctgagcacatgtgaggtcacctaaggcacatctgagttgacctgggggatgtgtgaggtgacctagggaaatgtatgagctgacaaagggcatgtgtgcagtgacctgggtgcatgtgaggtgacctggtgcatgtgttagtttacctgggggatgtgtgaggtgaacaggggcaggtgtgaagtgcctgaggaatgcatgaggtgacctggtgcatgtgtgtggtgacctagcagatttacgaggtgacctgcgggatgtgtgaggtgaatagggacttgtgtgaggtggccacaggaatgtgtgaggtgacctgggggatgtgtaaggtgacattggggatgtgtgaggtgactcagggcacatgtgaggtgacctgggggatgtgcaaggtcaccttgggtgagtgtgaggtgaccttggggatgtgcaaggtcacactgtgtgagtgtgaggtcatctgggatatttcaaacttcgtaaggaaagcctgcaacagtatatggcactaaaagcttcacactccaacaccgttaatgcgcacatcctcaaggaactctaagtgtttccaggttagcttaaatgccatggagcgacacctgccccaggcacactcatatatgcatcctgggtctccctatcaacccctatcctcaaattttcagtttatgtttgctccatgatatcaactctgatatgttgaaggtttttttttttcttttatttgtagttgttcaggtttgctatttcactctcattactctgggctcagtcctctcctcaggtgtcccacttcagagcttgctatataataggagacatgcaaataggaccctcccttttctgatgaaaagcagcgcagccctgaccctgcagccctgggagagaagccccagccctgggattctcaggtgtttctattgggtcaacagcaataaacaaattaccatggaatttgggctgagctgggtttttcttgctggtattttaaaaggtgattcatggagaactaaggatattgagtgagtggacatgagtgagagaaacagtggatatgtgtggcagtttctgaccagggtgtctctgtgtttgcaggtgtccagtgtgaggtgcagctggtggagtctgggggaggcttggtacagcctggggggtccctgagactctcctgtgcagcctctggattcaccttcagtaacagtgacatgaactgggcccgcaaggctccaggaaaggggctggagtgggtatcgggtgttagttggaatggcagtaggacgcactatgtggactccgtgaagcgccgattcatcatctccagagacaattccaggaactccctgtatctgcaaaagaacagacggagagccgaggacatggctgtgtattactgtgtgagaaatcctgtgaggggacacaagtgcgagcccagacacaaacctcctgcaggaacactgggcgaaatcagctgcagggggtgctcagggcccactcatcagagtcaaccccagagcaggtgcacatggaggctggggtttgtttcctgtcaggatttgggacttcctctgcttctgacagtttccctagggaaactctttaattttagatttctgtgcccaccaatgtcatctctacatatatttttttaaatcattataatacgaggactcattctcacatgcacaatatgtatattgccacctacgggaatgaaaactcctcaaccatggtcaccagcatcagagttgtgaggaagctcaggggtgcctggtgagtcttctccagtcagactcaggacagtaacctcaatgggattccctgactagaatggcttttagggatttcgattacagccaagagagaggctggaccaggttcagtgtcatgtaggacctcacagattttatgtatgacatttctcctgacaataaagtatgcaaatgagtatcagcactgatctggtgcttcctgactttcatttttagtggttctcgcttttccatttgattttcctgctttctggataaaaggatgttgtccctgtggtctaaatcctggggctcaagccctttccctggagcttaggtggggctcaggctgtgactcctgcagccattgggagaggctgctgagactttcttctctctcattgttcaggatactccactctgttttctggagacgcgtctgagaacgcgtgtggccattagtaatgagggcacaagcttctttggtcaaaatggggtgaggatgtggaattgatcctgtgctgtgtaaactgtcacagagtcaccttcttcaccagtagtgttagaagagcttgtaaaatttgtcggaatccaactggagtcccctgtgttcaaaccctgacaaatggagctggggaaggccatggatggaagcttctcatgcacatacccctgagaacaagacctagctttataacactccaaaaaaccacaaattgaacaaaggcaaccacaacaataaaagaattacttatatccctgagaacaagagctagctttataacactcagaataaccacaacaacaaaataattacttatatccctaacaacaagagctagctttttaacactcggaaaggccacaatcttgcacaaggcaaccacaacaatgaaagaattacttctgtgaaaatatctgcacagcaactgcctatccaaccttacactgatgtcaaccttgttattgatgcttctagcccaggatcgtcctcatcaaaatgtcattcagatcctgcgtatgaaaaaaattgtgtttttcagtgcactcatgttctagtaaagccctcagagaccctctccttcacctgtgctgtctctggatttccaatcataaccagtacttcctcctggagctgtatctgccagcccccagggaagaagctgaagtgggtcaggtgtgtaggtcacgaggaaacacacagtgcaacccgcttctcaagagtccagtcaccacctccagatccacattcagaaaacagtttttcctacagctgagctacccgcacaatgagtaaaccaccatggatttttatacaaaagacacagaaggggaggtcattgtgaggccagacacaaacctccctgcagggaagctcaggacaccagggggtgctcagacaccaagggctctcaggacacatcaaggcaggtgcaagaggggaaaaaaggtgctggaggtggggtttttcatcactgtcatattttactctccactatatttattctaatgtatattattttattattagacaatgatatttatataaatatatagccatacgtaggtgcaccaagttgtcctttccatcttatgtggaccttgtccattaggacgaagtccctgtatgtatttgagcacctcataagttatggttaattatgtaggatctctcactttttctgtgtcccttcctccctcctctctcacacacaaactgacacccacaaagagttctacaactttaattacctgatgcgttgaagaaaatttactgaagtgcagctttttcagtttaactgctgttcatgttgatgtaggaataagaacattgtctttctcaactgtgtagttctctaagctgagtagcacctttatttataatacccagatactgaaagcaatccaaatattgatcagcaggttaagcagtaaacactttgttctaaattcgttcacttgaataatacccactgttcaaacaagtacggctggaaatgctcaacaagggtaaattcacaagtacttatgacgagtaacataagccaaagaaatacaagtacatacatacagttccacttttataaattttataaaatgaaaactaatctaaagttacataatgaaaaccagtagttggccgtggacatggtatgagaagggaaggtgtagcaagtggaaattacaggacaacgagaggaaattttgaggataattttttctgtattgagaaaggttatggttatgtcattatttgtcaaattgtacacattaagtgaagattattactttctaatttcgacttcttaaaatactacaaatttaaacatatataatttggtagaaaaggagttagagatggataaaatatatgagaaataaaaaagaaaatctcagaacgatggcataaggattcaaccatcaaactaaataaattttaaatttctcaacacagaattatagattcataaaaccagctcctggattcattgattttttggaattgattttcatgtctttatctccttcagttctgctctgatgttagttatttcttctcttctgctagcttttgaatttgctcttgcttctttagttcttcaaattgtgatgttagggtgtcagttttagatctttcctgctttctcttgtagacatctagtactataaatttccctctacacactgctttaaatgtgtcccgaagattctcagatgttgtgtctttgttctcattggtttcaaagatcatctttatttctgccttcatttctttatttacccagtagacattcaggaacaggttttccagtttccatgtagttgtgcagttttgagtgaatttcttcatcctgagttctaatttgattattgcacttgtggtctgacagactgtttgttatgatttctgttcttttgcatttggcgaggagtgtattacttccaattatgtggtcagttttagaatatgtgcgatgaggtgctgagaagaatgtatattctgttgacttggggtggagagttctgtagatatctattaggtctgcttcaagtcctgaatatccttgttaattttctgtctcgttgatctgtctaatattgacagcggggtgttaaagtctcccactcttgttgtgtgggagtctaagtctctttgtaggtctctaaggacttcctttatgaatcggggtgctcctgtatttggtgcatatatatttaggatatttagctcttcttgttgcattgatccctttaccattatgcaatgcctttctttgtctcttttgatcttttttggtttaaaatgttttatcagagattaggattgcaactcctgctattttttttttttgctttccatttgcttagcaaatattcctccatccctttattttgagcctatgtgtgtctttgcacatgagatgggtctcctgaatacagcacatcaacaaaataaatagacagctatccagattaataaagaagaaaagagagaagaatcaaataaatgcaataaaaagtaatgtaggggatatcactactgatcccaccgaaatacaaactaccatcagagaatactataaatgcctctatgcaaatatactagaaaatctagaagaaatgcataactgcctggacacatacaccgtcccaagtctaaatcaggaagaagtcaaatccctgaatagaacaataacaaattctgaaattgaggcagtaattaatagcgtaccaaccaaaaaaaaagtccgtgaccagatggattcacagctgaattctaccagaggtacaaagaggaactggtaccattccttctgaaactatttcaaacaatagaaaaagagggactcctccctaactctttttatgaagccagcatcatcctgataccaaaacctggcagagacacaacaaaaaaaagaaaagctcaggccaatatccctgatgaacatcaatgcaccaattctcaataaaatactggcaaaccaaatccagcagcacatcaaaaagcttatccaccacgatcaagtgggcttcatccctgggatgcaaggctggttcaacatatgcaaatcaataaatgtaatccatcacctaaacagaagcaatgacagaaaccacataatcatctcaaaagatgcagaaaaggacttcaacaaaattcaacaccccttcatgctaaaaactcaatgctctaggtattgatggaatgtatctcaaaataataaaagctatttatggcaaacccacagccaatatcatacagaatgggcaaaaactggaagcatttactttgaaaaccagcacaagacaacgatgcctctctcaccactccaattcaacatagtattgagagatctggccagggtaatcaggcaagagaaagaaataaattgtataaaaataggaaaagaggaagtcagattgtctctgtgtgcagatgacatgattgtatatttagaaaaccccatcatctcagcccaaaatctccttaagctgataagcaacttcaacaaagtctcaggatacaaaatcaatgtgcaaaaatcacaagcatttctataacccaataacagaaaaacagagagccaaatcatgagtgaactcccactcaaaattgctacaaagaaaataaaatacctaggaatagaacttacaagggatgtgaaggatctcttcaaggagaactgcaaaccaccgctcaaagaaataagagaggacccaaacaaatggaaaaacattccatgctcatgaataggaagaataaacatcatgaaaatggccatactgcccaaagcaacttatagattgaatgctatccccatcaaactaccaatgactttcttcacagaattggaaaaaactattttaaagttcatatggaaccaaaaatacatcctgcatagccatgacaatcctgagcaaaaaaaaaaaaaacaaagctggaggcatcatgctacctgacttcaaactatactacaaggctacagtaaccgaaacagcatggtattggtaccaaaacagacatatagaccaatggaacagagcagaggcctcacaaataacaccacacatctacaaccatctgaactttgacaatcttgacactaacaaacaatggggaaagaattccggaactatttaataagtggtgttgggaaaactggcgagccatatgcagaaaactgaaactggaccccttccttacaccttatacaaaaactaactcaagatggatgaaagacttatccagacctgaaaccataaaaatcctagaagaaaatctaggcaataccatccaggacataggcatgggcaaagacttcaagtctaaaacaccaaaagtaatggcaacaaaagctaatactgacaaatgagatataattaaaggaaagtgcttctgcacagcaaaagaaactatcatcagaatgaacaggcaacctacagaatgggagatttttgcaatctatccatctgacaaagggctaatatccagaatctacaacaaatttacaagaaaaaaaaacccatcaaaaagtaggtgaaggatatgaacagacatttctcaaaagaagacatttatgcagccagcaaacatgaaaaaaccctcctcatcactggtcattagagaaatgcagatcaaaaccacaatgagataccatctcacaccagttagaatggtgaccattaaaaagtcaggaaacaacagatgctggagaggatgtggagaaatagtaacatttttacactgttggtgggagtgtaattaagttcatccattgtggaggacagtgtggcgattcctcaaggatctagaactagaaataccatttgacccagcaatcccattacttggtatgtaccccaaggattataaatcattctactacaaagacacattggggcaccattcccaatagcaaagacttgaaaccaacccaaatgtccatcaataatagactggataaagaaaatgtggcacatatacaccatggaatactatgcagccataaaaaaggatgagttcatgtcctttgcagggacatggatgaagctggaaaccatcattctcagctaactaacagaagaacagaaaaccagacaccactgttctcactcgtaagtgggagttgaaccatgagaccaggtggacacagggaggggaatatcacacactgaggcctgttgggaggtaaagggctaggggagggatagcattaggagaaatacctaaggtagacggcaggttgatgggtgcagcaaaccaccatggcgtgtgtatacctatgtaacaaaactgcacattctgcacacgtaccccagaacgtaaagtatcatttaaagaaaggattacatattccattaaatatatatgagaaatcagagactcctgaatatacacatgaatacacactgggtctacctatatttttagggaaacactagaatacagcaaaataatgtcatgattttattaaaaatgggggtttatcaaaccacaccaggcatgtccagctctgtcctggagctggttcagggaacaggtgggtcctgtgtttgggagccatgacaacaagctcacagcgtcagttctagttgaaacctcaaaaaggcaaagggatctcaattaaaatatcatgtagatgtcacatctgtgggtgctgcatactcccccgatgtgaatatggaaaggttaattacctcttgaactctctgccgagattagtgctggtctctcaggaacacccaaaatggctcgatagagccagaaagcagactggctcagggtttttgtgatggtttcgtcgtgggtcagagtgaggcttcccacgcacaggaaggggattgtacagtgcgaaacacccactggtgtcaaatgaggaagctcccgcaattcctaactagattcacattgtgtgataaaagacacacaatagacataacttcatggtcggatatcacaaaatgccgttaaaagatgtggtaaaaaggcaactttaaatttttagtcattggagtgcgtacaacacaaaaatcattttcaatatttgtaacacatgcatgcaataggacaaaggtatgtgatgagggtaaaatctcgaaagtgtgaatcttccagctaccaagtcgtagggtaataactgatgtgtgctgagggaggaaaccatcacgccatagtgctaatggtataacccttggtgaagagagttcaatattttattgaagttttcataatttttatttaaagatgccatttttcaacatactcagatgattgtgagtgccattgattctgtatcgtatgaacaatggcaataccttccatgtttacataatattaaaaaccacgttaagactgaatatttggtgtcatggtgcatcacgttattctagcttccatactagttgttttatttgtttgttttctcctttgttggcatttggtttcgaattcatatgtcaggtctctataatgtaggaatttatttaaaagtgtctttttttgtccattttgatggggcttccaggagacgtaagaacctcctctgcttgcaacacattttaaaattacgcactaatgtagaacatctgtatttaatcctggtttttagttaattgacaagctctaataagtgaagtaacttctccattctgggctgattttacatcaggtataggaatatatcctaggtgaaagtttgtaccagtaatatgaattattaggtaataacctccacctttatgatttacatgttattcatcaagaaatagtgttaaatcaggagtctcaatgaaagtattacctaagggatatacaaaatatattgctaatctacataaaacagatgtgaacacactcttagtatccagccatgtttcctgtcaaccacacagtaactttgacttcacttgggacttgttctaattttcaaattagttacttattaatcttaatgcttctagatattatgtgtgactattttagcagagagtgaagaaagacagcctaggccgactaaacaatgaggaaaatcacaacctgatgaaacaggaagcctctggatgtgagtggctccaggattgaataatttgacaactcatgtacccaggaagtttcttttctcaattttccacactgatgcatccagaaagtcagcttcaccccccaggtgactcccataatgcagtgacatggtgacaatattcccatggtcacatacgtattttatatattggctggaaaaggggcagagacagttctgcaattctcctctgaaggaccaggaacacctcaacagaccacctcccctgcccccatgactagaactgcaccacgtgcccacatggacactcatccctgatggggataagaagactccattgatgaggccgactattttagcatataaattagtaaagactgatataaaggtttcaacaactaattgaagtctgttcttctatgtccaccagagatatagatgctccagcgatatcttgtttttctttgctgcgtgactgtgtctcttctccttgttccatcctccagagaatctctttcagctcccacaggtgcattcctctgttacatgtaactgacaattgataaattagtggaagcccttacactaaaggaagagtctctgacctcatcttggtccatattcctagaaaggcattgtgcccgtaagtctgggtgtgaccttctgagtgttcctgtccctcctccagaggagatgctcatctgtgtgttcttgtccctttcactggggtagaaccaccctgtttcccccaggtgttccctcccacagctccagtgttccgcatcagtgtcatcacctcccagatctgctgccctgccctgcagactaaagctctgattccataagaaggagagttatgtctcaacagaacttcgtggcagtgacctctgttcccatctcaattcctgaggggttgcaccagtgcccctagggtactggttttggtggttcccctgcaaagtaatttttggttctgtagtggatataagggagtcgagtctgaatgcctttcaaaaatgggggctcttgttctctcccagacagacactttgggaaaggaagattttgtgactgccccttttttggggaaagggattcaagaggatagaaaagctcttcagtatgtggtcccttagaatttcaaactacaacaagcttaccatattcagtttcaagcaatcccatatatatttgtatttttatctttaacagactatatttcatatgccagactctgccttaggtaatctcatatgctggctttgttactctctacaagaacttgcttcttgttaaatttaagattttttttaacttcagttatcctaagcattcagaaatttgcaaaatttcatcttgactgtttatctgttattgttgatgtagttgtaagaaataaagaatatatatccctcatttatgtacattttcaagtcgagtagtagatttttagtactaccagagtaataaaataatttgaacattgttaagctgcttaacagaaaatcaaattatggtaaatttgttcaatggaatactacacaacatttataataaataattgtctgatacatgcaacaagaaggtaaaatatctaagtatttttgctgagtaaaataaaccagacaaatgagaagatttaccatataatttcatttatataaattctggaaaataaaaactgaacttacttaagtaatataacaacaaggtaaaatatctaagtattgatgttcaggaaaataaagcaaatgaataagaatatgtactatgttattccattttaataaactctgataaattaaattgaatctacagcaatataaagaagaacagaatttaccatttggggaaatggtagaagaagggaagaggaaaggaggaggaatatagaagaatgagagggaaattttgtgaattttctggttcaccttggtaactaggatggttacatcaggtttatcaattgtacactttaaatatgtgaagtttattatcagtaaactgaaatttataaaatttattaccagcaaacaaatgaaaacttgcacaagaaataagtgacataaagatagaaaaaatattaaatttcagaaacacctaataatttatcttcgtgaaccctagttctcaccatatttttaggtgaatgctagaatgcagcaaaattacacatgctctcaatacagaaagtgggtttcacaaaccacactaggcatgctcagctctgtcctggagttgggttagggagtaatatagggccagtggatgaggagcacaggcctagatactggggctcactaacctcaggtatgagctcttagatacatacaaagcccctccacgcatgggtttacttccccatctgtaaattgagaaaccattgacccctaaaaatatgatttacacaaatatgtaaaaatgtaagagagtgattagtgcaaagtgtttatcacagcacaatttcataacaagacagcaagttttccaaacagcatcattgtcattagattcctgcagggcatcattaccttatctgggccctgccctctgctcaggcatcccaccccagagcttgctatatagtaggtgacatgcaaatagggccctccctctcctgatgaaaaccagcccagtcctgaccctgcagctctgggagaggagccccagccttgggattcccaagtgttttcattcagtgatcaggactgaacacagaggactcaccatggagtttgggctgagctggattttccttgctgctattttaaaaggtgatttatggagaactagagagattaagtgtgagtggacgtgagtgagagaaacagtggatatgtgtggcagtttctgatcttagtgtctctgtgtttgcaggtgtccagtgtgaggtgcagctggtggagtctgggggaggcttggtaaagcctggggggtcccttagactctcctgtgcagcctctggattcactttcagtaacgcctggatgagctgggtccgccaggctccagggaaggggctggagtgggttggccgtattaaaagcaaaactgatggtgggacaacagactacgctgcacccgtgaaaggcagattcaccatctcaagagatgattcaaaaaacacgctgtatctgcaaatgaacagcctgaaaaccgaggacacagccgtgtattactgtaccacagacacagtgaggggaggtcagtgtgagcccggacacaaacctccctgcaggggcgcgcggggccaccagggggcgctcgtgacccactgagggcgggacaggtcccaggagcaggtgccgggagaggtttcctttctcctcagctggaaaagtcaggtttatcttcgcaggactctggagtcttctaggctgtgatattttgttacttatatttattatgaattttatcattaatacttaaattttagtaattattaacattctacatattattatatttttaagtatatactttcaagaaataaacattcctaattgcataataattattgtaacataattattgtaacatataattatatcctaaatgcataataattattgtaacaatcacattctcattttgtatttgaattttcatatttattttactaagattttaattttaatataaaatatttttctacaattgtctgttttccatttttgtgagataaaattagcatatacaaaaatgcacagattctccaggtacagttagagggtttcaggcaaatgtgcacatacttgtctacagcagctaagtgagggtgaggaacaggtgaggtccatctccccacaaagtgtcctcttagtgcttccagttagttctcacataaggatttttttttatttcaactttataatttagatacagagggttcatgtgtggatttgttacatgggattactgagtgatgctgaggtttggaatacagatttcttcaccccctccctccatggtctagcagtccacagtgtctgttgctcccatatttatgtctatgtgtgctcaatgctgaggtcccacttacaagaatatgtggtgttcagttttattttcctgaattaatttgtttaggattaagaactccagctccatttgttttgctgcaaaggacatgatttcattcttttttatggctgtgtagtattatatattttacatgtaacacattttatatatccactctaccattgatgtgcatctgggctgatctttgtctttgccactgtgaataacacagcaataaacatacacatgcatgtgtctctttggtagaattatttgtttaccttgtagtgtataccctgtaataggatagctggttcatataatatctccattttaagttttttgagaaatctccagtctgctttccaaagtgggtggactaatttatattcccattaacagtgtgtaagtgctttcttttcaccacagccccatcagtatccattggtttttgactttttagtgataaaaatttgagtggtgtgaggctgcacacctacaaccatatgatctttgataaggctgacaaaaaaacaagaaatgagaaaggaattccctgttccataaatggtgctgggacaactagctggccacacgacaaagattgaaactggatgtctgctttcaacatatataaaaattaactcaaaattgataaaagatttaaatgtaagacatcaaactataacaatccttgaagacaacgtgaaaatactcttctcgacaccagctttgacaaatactttttggctaagtatgcaaaagcaattgcaacaaaaacaaaaatagataaggagagactaatttgctaaagagttactacacagcaaaccaaccagctaatcaaccaaacaaacaaataaacaaacaaaactatcagcatagtaagcagacaacctacagaatgtgggaagttattcacaaatgttgcatccaacaatgccctaatatccagaattgtattagctggttttcatgctgctaataaagacatacccgatattaggaaatttatcaaaaaagaagaagaagaggtttgatccacagttccacaaggctggagaggcctcacagtcatggtggaatgtgaaaggcacgtctcatatggcagcagacaagaaaagagaacttgtgcaggaaaatccccctttataaaactatcagattttatgagacattcactctcaagagaatagcatgggaaagacccacccccatgatttaattatctcacagggggtttattccacaacattaggaaattactgaagctccaattaagatgagaattgggtggggacacagtcaaatcatatcattctgcccctggctcctcctaaatctcatgtactcacatttcaaaatggatcctgccttcccaacagtcccaaattcttatttcagcattaactgaaatgtccgcattccaaggcctcatctgagacaaagcaagtcccttctgcctatgagcctgtaaaatcaaaagtaagttaattacttcctagacacaatgggagtacaggtattgggtaaatagagcaattccaaatgggagaagttggccaaaacacagaggctaaaggccccgtacaagtccaaaatccagtgggacagttaaatcttaaagctcaaaaaagatctattttgactccatgtctcacatccaggtcatgctgatgtaagtgttgggttcccatggtcttgggcagctatgtgcctctggctttgcagggtacagtctttcacccagctgttttcaccggcttgctctgagtgtccatggcttttctaggtgcatggtgcaagctgttggtggatctactattctggggtctgaataactgcggccttctaatcatagcttcactaggcaatgcaccagtggggactctgtgtgaaagcacccaccccacattttctttcctcgctgcccctaacagaggttcccatgtgggcccctccctgcagccaccttctgcctggacatccaggcatttacatacatcctccgaaatctgggcagaggttattaaacctcaattcttgacttctgtgcacttgcaggctcaacacaaaatggaagatgctaaggctcggggctttcaccccctgaagccacagcctgagttatatgtaccttggccccttttaatcatggctggagcagctctgatgcaaggaagcaagtccctagactgcacacagcagagggaccctgagcccagcccatgaaatcattttttcctcctaggtctctggcttatgatgggagaaccttccacaaaggtctctgacatgccctggaacattttctgcattgtcttggtgaccaacatttgggtcctcgttacttatgtaaatttacgcagctggtttgaatttatcctaaccaaatgggattttattttctattgcattgtcgggctgcaaattttctgaacttttatgttctacctcctttttaaaactgagtgtgtttaacagcacccaagtcacaccttgaatactttgttgcttagaattttttactgccagatacctggtatcatctctctcaagctcaaagttccacaaatctctaaggcagaggcaaaatgccaccagtctctttgctaaagcctaactagagtcacctttgctccagttcccaacaagttccttgtctccatctgaggccacctcagcctggattttattgttgacatcattatcggcattttggccaaagccattcaacaaatctctagagagtttcaaactttcacacattttttgtgtcttcctcttagccctccaaactgtttcatcctcagcgtgttttccaattccaaatttgcttttatgcttttgggtatcttatcagaagcacttcactcaactgataccaatttaccgtattagttgcttttcatgctgctgataaagacatacctgagactgggcatttacaagagaaagaggttgaatagactcacacttccacgttgctggggaggcctcgaaatcatggcagaacatgaaaggcacatatcacatggtggcatacaagagaagagaggacatgcagggaaactcccctttataaaatcatcagcaagacaggagaactcatgcagggaaactcccctttatcaaatcatcagatctcatgagactaattcactatcatgagaatagcatgggaaagacccccccccaccatgattcaattatctcccacggggtccctcccacaacacatggtaattatgggagcagcaattcatgataagatttgtgtggggacacaatcaaaccatatcaagaatgtataggaaacttaaacaaatcaagaatcaaaagacaaataaccccattaataaatgggcaaataacaagaacagacacttctgaaaagaagacttacaggtggccagcaatattttaaaagattctcatcatcactaaccatcagaaaaatgcaaatagaaaaatgttctaatttttgtcattatagattgattttttctgttttgaacttatttttgctattttttaggtttatttatgtaatttcatgtctcaaggttttgtcatcgtatatatacatatgtatgtactaatacacatatgaatatttcatatctgaatcaatccataacatcagtaaatgacagtttattaagtaaataaatcagtttattatgtgaaataatgacgatatgtatatttgttttcctgttgatgaaatttaaatttgtttccaacataaatattataagcaaactgttataactatttttgtgcaagtttttctgtttatattctcacatattgataaaatatgtagaaatataagtatgcttttttattataagacttacattttcagctttatggagctaaagttgacaaataaaattgtatgtatttaaggtacaccacttgacgtattgatatacatgggaaaatgctggatggtagataagtaaacaatgctaaacagcactaattatcagggagatgcaaattaaaactgcagtgatatttcttaaaccagtcagaacagctactattaaagagccaaaaataacaggtattggtgaggattgaaggcaaaaggaacgcttggacacttgtggtgaggatgtagattagcacagcctcgatggaaaacagtatggagatttttcaaagaagtaaaagtagaactactttgattcgataaccacaaataactacctaaaggaaaaataaatcattatatcagaatgataagcagacttttgttttcctgcagaactattcataatagcacagtcatcaaacttaggaattaacctatgcctaacaacagatagttttataaagaaaatgttacatatatatacatttaaatactatccagccatattaagggatgcaatcatatcttttgcagctacatggatggaattcatcattattttaagtataataattgagaaacagaacatcatacaccacatgttctcacttataaatgagagtgaactcatatgtgcacaaggacatagagaaaggaatgatggacattggagactcagaaagatgggagagcaaaaggtgggagaatggtgagaaattacttaatgggtatgatgtacattatttggatcatggatatgttaaagccaagactactatgcaatatatatatgtaacaaaattgcagtcactccccataaatttatacatataaaataaaaacaaatacaattaaaatgattaacagttgataaacaatactgaaaattaaaatttgtgatcaataaatgaaaataatattagttgaacttcaaattttaaaacattttctactcaagtgactatcaagaaaattaaggacaagctgcaaaggaaaaaatatttgcaagtcatatatctaccaatgtaattataacaagaaccggcaaacctcaaagatgtacagatgacacatcagcataggaatgtgattttccaccagagaaatgcaaatcaagaccaaaaggagacactactatagactttctagaaagacaaaaaataaaaaagaaatactgacaatatcagagttggtgaggaagtcagtcaccctagagactaatatattgctagtgggaatgcaaaatgaaaccgtttctgggaaaatcatttacagtttcccataaaattaaacatgtccttaatccatgacctagaactctcactcctaagtatgtcctacaaaggattaaaatcatatgttcacacacgtattcagatgtttaacattgtgtgtgtgtgtgtgtgtgtgtgtgtggtgtgtgtgtgtgtgttagaaactaaaaacaacatggacgtctttgaaaatttgacacaaaccattacaggtgaactccagactttcttctgagtgacagaaggcctgcctgaaagatccccagagacacagtcgtggatttcactgtcaccctcgcatgtcactggcttgggctgggctctctctggctcttccctgaccaggaccagatgttgagctccactacctgcagttggaagtttatattttcaacaatgcactgaggtctaagttgctctgcagatggaaccaaacaaacatgggcgcctttgaacaaacagtgcctgacatttgtactgaccccaggagaactctttccagctctcattcttcttggttctctcctgcaggccagcagccctgaagtttagcctggatctcccatgcatccacccatctccttccaagtgcattttaccacagcctccactgtttttgaagcactcttgggctttgtaattctccacactctgttgtaaaggaagtcaggtccttcaagaccagattcgggactctattttatgaccaaatttcagcctcacccctgctcctgagacagagctcctagataagattctgcaggtggagattaggagtgtttttcttcttcaatgtagttgctgagcgctcagtgcagggttggggagaaactttccactttgtcagcatgcagctcctgctggggtagaccttcttccatagaagcagggttgggaaccagggggccaatgtcctcagtgctgctgcacccagggcagagccttcatccatcagtggggctgtggaagaagtgagtctctggttctcagtagctcttgtccagaactgagcctctgcagcatgttctgtcggccccagtgtcctggcccctaaggagcagcatcctaaaatgggagctagcgtatttgagaataacaacacctacacattcagaagctctttggctttctttccagctaatataatttccttttttttgtgtagcaacctgtacacacgcatattgatgcatacagacctatgacacttttttctcgataagtaaaaaattattgatcactgtgatcttttctccaagttcaccatttccctgaaggtgagcacaggtccttctgcatgtgttcaaacaaaaggcccagagactacctggtaagtgaggtgctcacctggttctggatgtttggtctgtctcctcccctctgttgccccacacaaggtcagcccactctttccaggtccgaagaagagagcacaggtttgtcctgattatatgactcacccagcttctgatgactctcctgttgccagcgtccatggcctcagtgaaggtgtcctgcaaagctctggatacaccttcgccagctacgacattcactgtgtgtgacaggcccctggataagggtttgaatggatggtagggagctactctggcaatggtaacacaggctatgcacagaagtttcagggcagagtcaccatgaccagggacacgtccacgagcacagcctacatggagctgagcagtcagagatctgaggacatagatgtgtactactgtgcgagacacacagtgtgaaaacccacatcctgagagagtcagaaatcctgagggaggtggcagcagtgctaggcttgagagatgacagggattttatttgctttaaagactttttttagaaagcgaggttaattcattgcagaaaaaaggaaaatagaaatgtgtatggactctaattatgtgggaaattttccatacaacttttgttctctaagcaaaattcagggagtggaaaacaaatcaaattaataaacctgataaaagaattcctctgaaaatttagtgtgagcataagtttttgaatgggtgttgtaaatattttggaacacagctgctagatcacattttaactctacacttatctccattatataaaatatcaaaatgttttaatgttttccattttgtgcaattataattttgtgttataatcacattttaacactttaactctacacttatctccattatataaaatatcaaaatgttttaatgttttccatttcgtgcaattataattttgtgttcatgccagcaatgcatgatagatcttgttcttccgcatcctcattgccatttggcactaagagtattgtgtattttaatattctaatagattagtagtgatagctcattgctgtttaaatgcacatatttctaattaaaattttgtatttaattattttatataattgtgatgaagtgtctcgtatggtatttggattattttttattgcattgtttctttttgatcagttgtaagtttccttatatacccattatataagtcactcacaaagttaacaaaaaattgattaacaaatatgtgttttacaagtgtattctccaaattgttgttgtcgttttactcccatatcagtgtctgtgggagaaaaatatttatatacatatatatgtgtgtgtgcatatatatatatatatatatatatatatatatatatagtgtgtgtgtgtgtgtgtgtaaacttagataaaataattatttcataaatcatacttttggcatcatatctaaaaactaattatgaattccactaacaggatttttctcttgtctctaatctcaggccacaatcacagcataagcatttaaatttctcctatttgatgagaagattattaacttaagatgtttagaattcttctgaatggaaggtgccttttttctaattttctgtattcaataatctgttaatatcagtattggctcatgaatgtttattttttactatggagaagatctagtgctacattatttattttatcgctcaaatcaccacagcttttttttaggttctgtgagctcatttagtttggattctgtatttttacagcatgccccatccttttgtttttgatcacttccctatttcctggtattacaagaaatactaagctcattatctctattatcttttccacacatagaatcagttatttctccaaggattactggtccctgatattaaagaattatattaaaacacaaaattatgatgttggatgtgtgtgttgttaatgtactgtcagtgtttctagaatctctaagctaacaggcctagaaaatgtgtatgtgtatattaacccatgttaactgacccatctaatctatttatgtatccaatcttctgtatgtttattgcatcaaactttagaacactggtatctacaatctactatgatgatacatgaatgtttcaagccttccttccttgcctgtccataccacctactgcaaagtgaggaacccctcccatcatttgccgttcattcaatttgttgtacaattttagaatatatgcgtcgtggtattagaattgttaacttgtacccctgttggaagtatgtttattgactagaataaagtgtttaagtgcagtttctttatactttagacttacagaacaccctgagttctaagttatataggtgagaaactttatgtgccaccttcttcagtgaggttatttgaaatatgttgtatacattttatttgacattctgtaaaagacaaaactgtagatgtcataaatatatgaggattttctagaaatttagagagagggtatgcattaggagaaacaggtactgtttgcaaacagtgaaattttttatgatctgcagtagtgaacacatgacacaatttgttaattctcacaattttatgatgtaaactgtgaatctaaatatatacaacttacaaaattatgtagcacatcatgaacatgcaaagtgtacaaaaataaaatatcaaatacatttacaccgcgtgggcagggaattgcatgagatgcaggcaacaaagaatgaagtaaccttccccatttgcacataagatgtttccattcacaagagacctttcttttatcaggttcatgtgcaaccaagtttccctgctgacaagcatttaagccagatgattcgcaacttcctttgactgagaaagatttccctcaaacttcagctcagtgcaggcacacaccatctctgaatgggcatttaccatcagacaatgcccacacctgtccccacatggacctttccctcagacaaacaaacacatcctcaggttgactcttccctcagacaagcacccctgtcttcatgtgaactcttccctcagataagcacacatgtccccacattgactttttcctcagacaagcacatatagctgacaacgaacagttatgtggcaaaatgagctcaggatagtggtaattatggactccagctctgatagtttgtagaaattgtcatttttaaaattctgactgaagactttcctttattgtagaagacagtcctttacagctctaattgcacagcctacaggcaggagtccatttcctctgggcaaggtttatttttatttgtttactgtacttatttgttgataaatattgatactacaaagatagcctatagggtccacatacgagaaaaaaagagtaatgggcagatcaaccctgcaaatccagtcccaggagtctttgaccctgccctccctggaatccagagacagagatggaagaggcctgctgagcagtgcactcatgtccccagggagaaagacatggaaatgaggcccctcctctgcaaatgaaaagtagctcatcccctgttcctgtagatcctggtgaggagccatcccacatctgtgcccttcctcagtgtccacaccatggggtctgtgcggatctgggctgctcttgtcatcactctcaatgtttaggttccccgtggatcaggccctgctgtggctgttgcctctgtgtttgcagaagtcccctgtgaagttaactaatggagtcagacagagaaatactacagaccaggaattctgccttttctgcaaagcctctggattcactttcactgaaaacagcataagcttgatccagcaggcttcatgacaggggtgggtgtgggtaataacaataattcaaatagaagttctcagtgggactctccttgagtaaaaagatgattaacaatcctcaaatacactcagttcaggagattctcttttaagatgattaacctgagagctcaggaaaagtccgtgtattactttgagggacacagtgaggggacatctgtgtgaactcagacaccaacctccctgcagggagacaggaggggactgcctggtagatgcttctcagaaccaccagggggtgctcaggacatcagggggcactcagaaccatcaggggatgctcaggacaccagagggcactcaggacactggggggcggggggtcactcagaaccaccagggggcgctcaggacactgggggggggggggtcactcagaaccaccagggggcgctcaggacactatgagggggggtggtcactcagaaccaccagggggcactccggacacggtggtgaggggtagctcaggatagcaggggtgctcagaaccaccagggggcgctcaggacactgagggggggtcactcagaaccaccaggggacactcgagacaccagggagccctcaggacactagggggagctcagaaacaccaaagggcaatcaagacaccagggggatctcagaaccaccaggaggtgctcaggacaccaggggtctctgaaccactagggggagattaggaccccagggggctcagaaccactagggggttttcaggagaccagggggcgctcaggacaccagggggcgatagggacaccaggtggttcagaaccactagagtgtgctgagaaccaccaggggtgctcagaaccccagggggctgctaaggacaatagggagtgctgagaaccaccagtgggcgctcaggacaccagggggatctcagaatcaccaggctgtgctcaggacaccggggggtgctcaggacctccaggagcacacacgacacaaaggatagctcaggacctacagggggcgatcagaacgccagggtgcgttgaggacaacaaggggctcacaggacacaacgatgtgcttagtaaaccgggggacactcacaaccaccagggggtactcaggacaccagggggtgcccaggaaaccagggagcactgaggacaccaccgctcccttaggaggcagatccacatcaggtccctgagtgggagcagggaggagggttcctcttgtatcttgtcactaacatgttgggagtttttctgcttcctttgtggtttcaattattggctgattcttcggtataaagcagagcaagtataaagctctgctttcttggattatgtcatgtttttggctttggatgctaccagaattacattgtactttgagaggattcattcatggtgtgtgcaatagtgaatgaaacctgtaattttaggggtggctttgaaagctatgttaggtgtggctgagggaagtttacaggaaatggtcatcactacagaaggctactcatttctttgcacatttgcgtaagcaattgtagtttatgaattaaaaactgcctgttttcttggtcctttttcttaaatggtcccactctaagggcagtaatgtaatcaagctgtgtttcaaagatctgcaatcaagttaagtctgtttaatgaaatgctttgtaaagaaaatgtacatctattttttagagtcacctttacattttacattgctttacaaatattaatttggtaaatttagtctcataattatcttcagtaattaaaaatcttaaagtcatgtcatgttaaattaagtaatcctaggcttctcactgtgaattagggttactaaaaattagaatagtaagagagtataatcaatttatggtgaagtttattaagaaagatgaagatacgttttttgcttaaaaatattttgttttccagtttacagggcctttctactggttttaagatgacaaccactgtttacatctaacccttttttgttgaacatctgttgagtttctattcatattccacagctagagttttaaagtaaaagctctagtatctttgtattagtgtgaatgtgtgcttgtatgtattatgtacatatatatatattttttgttatgtgttatggctacaaggtacaaaattgactttaaaataaataactattttaaattaagtcaatgagccctaatgcatctgaagtacatgtaacttaaataaatatgtaataaataagctggcttcaaaattattggtaaaataaaattggaaatattttaacaattattagaatacctcatagtttatatcaattgatcaagtgattttatatttaaaatcacagctagatattatatggtgtgaaacatttctatgaagattataaaattattaacctagttaaaaccagaatgatctttgtaatttgacaaataagatgtttaatactgttgttttaataaaaaacaggtaaatagttattggaaatacaatcatttatttaataagaattttacttaggtaaacacctgaaattcatgggttataatatgggtaacagggaaaaaactttaaaggatgagtattactgttttcataaatgatctaggtaagctatttaaaaaataaattaggttaatgtaacaaaataaaccttttaaataaacttgttctacaatttaaaaatctaaagtttaattaaataatagatattaactaaatgtttaggtcattactaattgttttaaaaaatgtatactataagaaaatatttttgtaaaaaatttgttcttacagaaagattttatttaattcagaggttacttataaaacatcctaaacataaccagtaaataagagagatgccactgcactccagcctgggtgacagagcaagattctgtctcaaaaaaaaaaaaaaagaaaagaaatttttagacatagaggagtacttttggtatgaaaggttaaaataaaaaaaaataattttatatgagaaagaatcttgtaactttttatcctaaaataaaaatgactttatttaagaaacagtgatgtttagaataaaactatatgctcaagtatgccataagcgttttgtgtaagtcaaactaaggtttgtaaaaagttaattaattaaaataacttcatattatgaagttgactataattaaaaaggaagtatttataatagtctttatagatttgtagagatctggctttcatataaaaatatataaatatactaaagattggttagaatgaaaaattgtcttaaagtattgatttactcaataaaattataagatattttaattttttaacccaaaagtttaactcttactgcatcttgccagttttattttattctcttttgagaaggcttgagaggatctcaaatttttcatgagctcctctaacattttttttcttacagcagttagcctctaacgatgttaacttctaactgttgttagcttctaactgctattattgcctgatgctaaaaatcttttatattaaagttcttaataaaatgttttatttcaatatagtattctgcactcttgggtttttttaaatgtctatatttgtctatggaaccaaaatcttcacttgtaatccaagacacattcttcctatgtctaattaatcaaatactttgtttcattagagttgacttgcaggttatctgcatggatttccccacagggaaacacagtcacactgctgaaggtgttttttcccatttggtaactggcataaaacaaattttatattttcttgaaatacttcctctgtagctgtttttaagtttttcaactacttaggaatactgagattttgagaaaatataaattattgttattacgttaatgtaactatctgcataacttttaaaggacttgtcctgctacattactgatctttgattcctaggtctaaaaaggatacacaacactttgggaggcttcagagggtggatctcctgagggcaggagttagagacgaacctggccaaaacggcacaatctcattttaataaaaaatacaaaaattagctgggcgtggtggcgggcgcaggtaatcccaactacttgggagcctgaggcagggagaattgcttgaacctgggaggcagaggttacagtaagccgagattacaccactgcactccagcctgggtgagactctgtctcaggaaaaacaaataaatacaataaaaataaaaaagacaccgagtcttgctaaattttaaactctgacagcaattgaagccccatctagagatgtggaagaaaatgacaataaaaattaatcacacacttaagacacaaggccggaaaattgaatctactcaaccactccaggcccagggactgttacagaagaagcggtttgtaagattgtaaaagctaattttgaaagatgaaattacttgagagttttttatacagtaaacattaatattaaaggcacactaatgccaggctagtagctgggccatgtgtcagattgacaagggtttcttgaagaattaatccactttttaatttgaaaaacttataaaagtttataagagatcatttgaaattaaattttatggtaaaagtaattataatgtaatagatttatttttcagaattgagagacagttttaacttctctcatgctgttcttataaggggctattgtttagaaaattaattcttctctttgaaaaataaaagtttttgctttctttcaaaatcactgagttctcactgggctaaataaataacttacattacagcaatctgtaatcctattttgtaatatcaagcattgtaaacttttgatatttgacaaacttcacaaaataaaattctaaattcagtcatttgacctcattattcttttatgatattaggtccccaaagccaaaattaaacatattcagcttatttggtataattaaaatatgcaggaagcaatgtcaaatttgcaaaagtgtttaactttggactatatttaaataaatgtggactatataattggactatatttatataaattaaagagtatattttccaaaattgtatgagattcaagtgatttgatatgtcttagtatattttatcagtagtatttatgattattatgtaaaatttctgtttattgcagaaataaccaaatcttcccctcaattctgtctttaaccatggctattctaaaacttcagtcatccacagttggtgttttactttgattctttatcaggtggcttatagtaatctatagaattttgaggagtactcaaatatacgattgtgacaattttataaattgtgccattggtatagagattaaaacttccatgactctcattgatacctgattcatttatgatgattgttaatctaatattaagcaggacaggacttaattgcatgaactgaattgacagaagactgaaattgtttttatggcttattctttaatgcatttgctaattacttatgttctgttttttcagaatcaggaaaagtttgtcttttaagctcttcacagttgttaacaattgagtatggtatactttactgataaaaaaataaaaacataatatcttcttatttacataatttctccaaaatttggaaactgtgagtattcttatatcaaaatagttatttgcataggttcaataaaaacctgctttcttccataacagggcacaattggagacaatggtcattttactaaggctttaacttgaattatatattttcagatttactttataaaatgaatctaacctggagagctgataaagccccttgggaaaactggcatgcacatttttttttttttacagggccctgaactgtagtaagtaaacaatttaatttctgacagacccaggactcccaggttttcttggaaacttgaaaaaagagaaagtaacccaattcacatagctatctggtggcacagataaaatattggctgggcttgaagattttaaagattctaccctttgattccttataaaaaatttccagcaaagtcaatttatgaataaaattgcctatgtacaaacaaaaaatagaaaacaaaaagagagctaatatgttaaaggattactttgctgcatcttatacaaaaaaaccaggccaagtctcataagcctaaaactgattttacaaatagattagtcctactatgattttgtgtctaataaaattggggaattatagagagaaatattatttcaaaataaactatagtgcatcagttaatagattttaaccttgtccacttgcttttcaatttatattattttctacaatttggactgaattttaaagcgtatctttgcacgagtctccaaaataatgttttcagttatttccctttttaaatatttttcctggcttgaaatcagcagaagttaaactgtgctttcttacagctagacaatgtaaattctaaaagaaaacaaaatcaatgatatggtttggctccgtgtccctacccaaatctcaccttgtattgtaataattcacacattgcaagggtggaatgaggtggagataattgaatcataggggctgttttcttcatgcttttctcctgttagtgagtgagttctcacaagatttgataattttatgaggggcttccctcttcacttaacacttctctctcctgcagtcatgtgaaatagcatgtgtttgctaccccttgcatcatgattgtaagttttttgtggcctccccagccatgcagaactgtgagtcaattaaacctatttttctttaaaaattacccagcctcgtgtatgtccttatagcaacctgaaaatggactgatacaagcaacttaactacatacgaagtctccttttgtacctgcctattgtgaagagaaaataaatcttgagaccccaaaatcactaagctaaagagaagagtccagctggtgtaataggagatagaaagaaattatttaggtagatagttaggatgaaagagtctctggcaaaacttttcttctcacaagaattagctcagaaataacttcttttctaatcagacacagttcaaagagatcacttctaacaaagagcagcctgaaagatcgggctgtaaaacatagataaacaactctggcagagagggtatttctgtgtgtaatcaccaaagttcacatacataggatgggtcccaataaaaacattgggtcttaatgagcacattcctttccttttctggggtcacactgagataggaaagctgttagcttgcacggggtttgggatgcctccagctgcaaggaggtaccagggacctggcatggaaactcctcccccctttttcagcacatgcatggtggaaggagataaggaacgtggagcagaccaagctaagtccccacctgcataataaaagcatgagatggggctgccagagacttcgctctctgcagatggcacacctggtcctgcttttgcaccttatgttgataagaagccatctccccacgagcacatttataaaaatccttacgttgataagatactgtctccccacgagcacatttataaaaatccttacattttactgcggcacagcaacccatctgggaccctttctgtgacagagagattttttttccttttacacattaaatttctgctctaacctcactctttgtgtgtctgtgtccttgattttcatagccacgacacaaagaacctttggtgatattccagataacaaaggtgctttactggagagggctttgggcaacctgcctcccattctattcaaagtgattcctctgaggcccacacgagacagatacatatctgattgcttcctcttcagtatcatttatgaaaaaatgaagattcactaagtctgactaaattgtggattcagtggtaggctgataaaggacttaaaataatgcaacctactgtgtcttatctacttctaaactgcaaaaccccctttcaatttgtcctgtcttgaaggaaaaaaaatgtacattttacatatattgattgatgtctcatgtctctctaaaatgtataaaatcaagctgtacttcaatcgccttgggcacatgtctcaggacttcctgaggctggtcatgggtgggttcttaactttggcaaaataaatgtattagtctgttctcctgctactaataaaaacataaccaagcctgggtaatttataaagcaatgaggtttaatggacttatagttccacatggctgggaatgcttcaaaatcatgtcaggaaagcaagggacatcttacatggtggcagacaagagagagcttgcacaggggaactccccttgataaaaccatcagatctaatgggacttattcactatcatgagaacagcatgggaaagtgctgacttactgcaggagaactacataattttatattttcctatatgcttctttttcattacacatgtaaattttcataccatccaaatttccccttacccagcttttcctctttatatattgaaagccctaaaaattgtctttggggaatggcactaaccacacacagtttctgtgattacttttatttttcttccaggcatgtcctggaaagacataatttcctttgggaaaattaattttaatttgattaagatctgtctcagaaaccttcggtttacactaggaaagatcccaaattaggagccaattactgtaaaaatcagccataccactctgtgagtgtgtgtgtgtgtggcggggggtgtatatgtgtgtgtacatgcatgttttcatttctgtgggctttaagccatgtagttctctctgcgaagatactatttggcatgacctttgaatagagaattgtaagagaaataagaggctcctatgaattatccgaaagtttctggactcaccatgtatcttgactgtgtcattgcatctgacagtcccagggaagtgactctctggtggtttcatgaatctgtgcttgggctctctctgcagtttactgggtatagtaatgacaaatcactgtttcaagagacaatttcgaaagcattagatgctgctgagagaggattatgaaccaggggacagccccttcattctgggggagcgacattgggagaatatgctctgtgagcccaaacagcttcctcccctgcagggtgagggcagagctgcaggacaggcccagaacccactcaacacagatgtcagccctggagctgctgcagaggagtctgaggagaaaattttaccagcacctgaattacacttatttcaaacaaaaatgcatgtcctgtgagtgtttgtttccctattggaggagttctgtactcatgaagttctggacatgccagcggacaaatatcagtaaacaaacatcagaacttgaacctcagcttcccactgttgcattctccatgtgtcatctctattatttctcatgctagatcaggtatttagctatgaaatattccagctaattaacgtgtaaatagcttgaagtctactgagttaaatacatatattttctcttgtttttgccaggtgttccctcccacacctccaatagtctccactattatcatcatcttctagatcttctgcgatgccctggagattaaggatttgattccatgacagagaggaggtgcatttcgatggaactttggtgaaaaccttggtctttatcccatttcctctggggctccaccagtgcctctggaatcatggtttcagtggcttgcccctgcatggtaggtcattcctttattctgtagtgctgatgagggaggtgggtctgaacgcatttcagtagtatgggctctccttctgtctcagacagacactttgggaaaggaaaatttttctgagcgtcctcattctagaacaaagggattcaattgtataggaatgctgaaaatagaaaaccttcagccaaattaaggttaataagattaattgagcaatggatgattcatgaattgggcagcccccagaatcacagcagattcaaagagacttcagtgcagtcacggggtggaagaagatttatagattagaaaaatgatgtacagaaatcagaagtgaggtacagaaacagctggattggttacaggttgcttttgtcttatttaaacaaggtgtgcaccctcaagagtgtacgagtggttgaggtatggctgctggaattggccaagactccgctgttgttacaggcgcatgctccaaagttggcttttcaatctcgtccacctattcaggtaggttacagtttgtccacaaggactcaaacacagaagtacggagtccttttcaggccatatttaattcactttatcagtgcccttcagtatgtggttcctgagaatttcacatgacaacacgtttaccacactggaatttaagcaatccaacacgtttgtagctttgtcttgtaatgggctatatttcatgtggcagcctcggcctcagtttagctaacactatggcttcatttctctctacaagaactcatttcttccaagatttccatgttcctgaaaggaaaataaacctttgggacccccatatcactaagccaaagggaagtcaagctgaaaattgtttggggcaaacccacctccattctttccctaaaatgagagctactaaggtttttaaaagctacagacctccttcaaaatttgaccacaagtaaaatccttgtggacccaggacagagagagtcatttctctgctcatgtaagtcaaacgcatacctgattgctccctgtgctctactgtttcactaagtcagactaaggcctacgtgactattcctgtaaattgtgcattcagttaaaggctaatcagaaactcaaataatgcaaccatttctctcaaacctacctatgatctagaagccctctccccacttcaagttgtcctgcctttctgaactaaatcaatgtacatctgatatatatatattgattaatgtctcatgtctccctaaattgtataaaaccaagctgtgcccacaagcttgggcacatgtcgtcagcactccctgaggctgtgtcacaggcatgtccttaatcttggaaattgaacttcctaaatctattgagattagtctcagatactctttggtttacaggtttgtttttatttcataacttcaattatttgacatgctaaagaaaatttgccaaatagcgcattctcttgtttatgtgttattgttgttgcaaaaataatatattttatatataatttatcatctatgtacattaccaaattgagtagcagatttattagtaagacccaaagtaatgaaaagttcagataccaattagcaacttagaaaaacaaattatgctacatttgtttgctgaaatgctacctattatttataaaaaataaacaatacaacataaaaggtttaattctcagtatttctattgagaaaaataagccaaatagatgagtacatactatattatttcattcttataaattctagagaataaaaactagtctaaagaaatatgaaaacatcagtacttttataaagaaatggtagaagaaaaggagaaaaacaaaaatatatctataaaagagcaagaggaattctgaggtgagttgacttgtcaccttcttgaaaatagagactttctttatcaaagtttactattgtacaggttaaatatgtgaattttatcatctgtcaattaaaactcataaaatttattacaagtaaacaagtgaaattttagacaaaaaagggatgataagaaggaacaaataaatacattaaatgtcagatacaccaaaaatgtatctgcctgacgcctagttgtctctgtatttttaggtaaatgcagcaaaatcacacaggttgtcgtggcaggaagtggattctgcaaaccacactaggccgtttatctctgtcctgtagttggttcagagcaactgaggccagctgtgaggcgcataggcccaggtactaggactcactcatgccagatataagccctgagacacgtacatagcccctccatgtgtgggttcacttttacatctgtacatgaagaaaccactgactcctaaataacatcatctatacacataggtaaaaaaattaaaaatatgatagttgttaaatgtttatcgcagaacaatttcaaaataaggcagcattttcccaaatacaatcattgtcatcaaaatcccccaggacgctctcatctactctgcgccctgccttcacctcagatgtcccaccccagagcttgctatatagtaacagacatgcaaatagttgactccctctcctgatgaaaaccagcccagccctgaccctgcagctctgggagtggagccccagccttgggattcccaagtgtttgtattcagtgatcaggactgaacacacaggactcaccatggagttggggctgagctgggttttccttgttgctatattagaaggtgattcatggagaactagagatattgagtgtgaatgggcatgaatgagagaaacagtgggtatgtgtggcaatttctgacttttgtgtctctgtgtttgcaggtgtccagtgtgaggtgcagctggtggagtctgggggaggcttggtacagcctggggggtccctgagactctcctgtgcagcctctggattcaccttcagtagctacgacatgcactgggtccgccaagctacaggaaaaggtctggagtgggtctcagctattggtactgctggtgacccatactatccaggctccgtgaagggccgattcaccatctccagagaaaatgccaagaactccttgtatcttcaaatgaacagcctgagagccggggacacggctgtgtattactgtgcaagagacacagtgaggggaagtcagtatgagcccagacacaaacctccctgcagaatgcctgggggaaatcagctgcagggggcgcacaggacccactgatcagagtcatccccagaggcaggtgcagatggaggctggtttcctgtcaggatgtgggacttcatctttttagagtttctctagggaacctctctaagttcagaattctgtgcttaccaatgccatccctacatatttttaaaatgattattttaatatgaaaacctattctcttatgcacgaaacacagactgatgcttacagagatgaaaagccctcaaccattgtcaccaggatcagagtattgaggaaactcaggggtacctggtgggtcttctccactcagactcaggacagaaacctcagtgagtttccctgactaggacggtctttaggaattgtgatcgcagccaatagagagtctgggcaaggatcagtgtcatgtagaacttcacaggtttcacttctgacccttctcctgacactaaagtatacaacttagtgtcagcactgatctggggccccttttgctcttagcccattctatttctttttatttgttgttgttgttcttgcttttccttgtagtgttcctgctccctgtaaagtggggatgtggctcttgctgccaaagctccaggtctcaagcccattccctgcagctcaggtggggctcaggctgtggctcctgcagccacgtggaagaggctgatgggactttcctctctcccattgctcagcaccctccagtgtgtcacgtggagactcacctgcgaatggaagtggccaacagtagtgaaggggatgagcttgtgtggacaaaatgggatgtggatgtgaaatttatcctgtgctgtgcaaagtagcacagagtgagtcaccttcctcaccagtagtgttagaaagagggtgtgaaagttgtcagaatcaaaatagatccacttgtgttaaaaccctgacaaatggaactaggaatgaccatgaaggaggtttcccatgcacatactcctgataacaagatcgaccataaatggattctgcttaaccacaacctttgatagaagccaccatgaccttataaaaatcacttctacaaggacatcttcccagcaaatcacggtttaaccctatactgatgccaaccttggtattgactctacaagcaaggaaaatcctctcaaaacaatttatgcaacccacctcattttcactcataaacctatggattgacatcctggagccactgctgcatttgttgttaatggtaattagccccttttacaatatttgtgactgtttttctccgatgtctcttggaaaataaataatttacaagctgatggcagtaaagaaactatttaggacatttttaacatcctgttgaatatttctgcatagcacatcggtcccctaaaatacttcgctgtattggcatgtgatgaatcagagtataatgctgaaggtaaaatgggaaatacatgggcttttgatgaatcaagtcatagggtgagaatgtctgtgtccttgaggaaggagaccttgggctgtaagttctagtgggagtacctttggcaaagggatttcatgagtttctgaacgttatgctacttttaatttaagaatgcaacttatcatttatttttacttaaatctttccagaagatatttggcagtaaggacagggtagcattcgtgtgatactgatgacttagagagttattttgtaatttctcctgtaaggtatgcacattgctcacttgatacagaagttcaaatgtcacaggcgggaaaataggaataaagcaaattttattaaatgtcacgactgtagtttttggcaaggaagtgcttcatgtcaacctgaaaatagacagacaacaataaaacatattcaaatccaaagggagtcagacctatgtccctctctcttataagtacaaggctttgccacatccaaaatatcctttaggctccagggtataaaatgcttttggactgtgaagctaacagctctcccctcagacagggataaggcatctggggaatgcagagttgtgttcatgaagaagatggcattactgtgtcttctcctgtgcctggtgatggctcccccagggtgagtgtctcagatgtcagatgtgggtctatggggtgagtgtaggtacatgtgactgacggggactgattccccatgtattcacatgccctgtcccaggagcagctgcaggagtcagccctggacctgaagagcacacacttaccctctgcttcacctacaccatttctggccactccatcacaaccagtccttactactggacctggatctgccagctctcagggaggggctgcaatggatacaatgcattgctagtggtggtgggaatccgtttgtcttgtggaaaatggcagcatctctttattttataaggcagaataatgttatattgtgtacacataccacattgtctttatccatttgtccatcgacagacacttagtttccatatcttggctgttgtgaatagcgctgcagtaagcacaggagagcaggtatcttcacagggtggtaatttcatcccatttaggtgtatttccataagctggatcgctggtcatatggtatttcagttttaatttatttagaagccaccacactgttttgcataatggtaatgatgggaatgtagaatgtcatagccgctacgaagaacagttttagatttgaggtataatccaaaagcaaataatgtttgatcatggttctcatatgaggctctaataaatctagtggaagtccagaaagttttcccaccttgggcaaggatgagtttgcccctaattgtctttgaggcagaatatttgcagaatgtgagatggagtatgtcggcaggattcaggatgattcagccataaatagtaatggcacagaaaaacagggagttagagacatgcagagaaagaaagagatagagagaatatgaatctcataagaggaaaatctgctggatatcagtgttgggttttcattcatagagacatcagtgtcagcaagaaaccatgaagtcaagtgaggagtggagaacatgttcagtctgaaaatcagcatattctcagaggcacccattgtcccatgacacaggcagagaatttcggaaaccagtgaagtgggagttcacaataagtgatgaagttatcatttttccaaactttcattaatatgcaaagtatttctatagatcactcatgcacatacacacaaaatgtgtttttgcatttatgggtgtctagagaaaaataagtgagaaaatttttccaggttgcagagatctgtttaagttatagattccacaggagagtgtctttgaatgaatactattctattaattaaataggacaaaattccctctgttggagcagccttccaattatgtagatttctttattgcttcttgagttgtgaaacataaacccaaggattgacttactggaattcgagtgctgtgttgataaaatttctgataagttttcttccaatgatttgagaatagctttcctgtttttttactcaaggaaatgaattttcacaaggtttcaggacatcacgtttcaggtgttttacttaaagagactcttcctgggtgcagtcagctttcttctaaccatgagctcacttcttcagcaaaccattcagtttgtgcctctattaagaattatgaagcttttaaacttcaatgcactgaaaatcatgccccttgaattaaatgttgattggcactgacatgaattgtccactcttggatatgtgtcctatgttatgggctcaacatatcagtggactgagaatcctccattagctgcctctgactgtggcactgaccagattgagaatcctcagagtcatccatgaaaaagagagtctttaggttcatggggtttttggagacattcaggtgagtggaggggagaaacaggactgggggtggccagccatttcaacaagactgggaaagattagcatctaagtttaaaggtctacatcattccaaacaccctgcatgacaggctgacaggaagaaatccaaccccacagcggctccatagcatctctttagtatacttggtagtgaagctgtttcagggaagaaacgtccactcaagggagtcagtgatgcttctctgagctacaataaaccgtgtattggacccaggtttctctgagttcaatgtgatgattacactcagctgctgctccagtgagtttaaatgagcatgtggcaattcagatgagcctggctgtgtggtatgttatatgtaaatctgaactatgtaaacataaagggcatgtcggaactagtgtgagggtgagagatcttagaggccccacacctcacactcttgtgcttatttgctccaggaacctccaggttctttgagtgaaaatcaacatagatcctttcctggataaatcatccaaatatctaatctctgagaaatacacatgcacatttctccggatagaccatccaggggaaagacatatctagaaccttatctgtgttgggtaaggtagtccatctccattacagaccctcccagcagccttcctttatcatgaaagtggataaaattagccaatagagaaataatcctataatgttatagccagaaaagggaaagcaacagtttcatttctggagactctgcgtataggtcacaacccagagaaagaaaggatgactgaattattaagaatcaattgtaagaacatataatacttccaggatgcacactttgttttctcaccagtataatctgggttaaagatgaaagtgtggaaatgcacagactctatgtgaggaggagaacatagggaaactgaaagacaatggcagagaataagacaaggacagtaggaaaatctgaagcctctgacataaattttttgaagacaaggtcttggcaaatccattgacctcagattcttttatcatggggcatttgcagggttcctagctgagaaaaaaaatgcatgcacttcccaagtctccacttgtattctgtttgcctcagatcgctaagtgaaaaaaagccataaacctaggcctagtgtgtgtgtaggaggcactttttataggctagaaaatagtaagaaaggagaatatgtgttattggaatagcatatacaaaggtgtctttattctgaatttatctgtacctgcagatattctcaggtgcaacattcaactgcaagagcccagcgaagaaactaggcactccccaaatccttcaagtttttgtgttcattgtgtgtccactgactcaggaaatgtgaagcttcagaaaagggggtcccttctgtgtcacagaatcttgtctgtgggtctccctctgtaggtttagtaaggctaatcaattgttaaaagacatggtgtcagcagcatgtggtgtcactgatggagaattctaaaccaggacacagccacttcatgctgggctagagactctgaaggaaaatatttgtgagccccgacagaaacctcattgcaaggcaagagcttctgtggaagggggcacttgggagccaccaagcgcaggttccagccctggagcaggtgcacagctggggaggaggtttcctctcagtgcctgggttttcgtttgtcaggaaaaaacaatctaaaataactgttcaaaaagtcgctgatgtgctttaaatattctatcacatcaaaaccattcatataacttaaggcactgggaactattttttaaagtgggtttctagaactataatatcttaatagtgagaatatgaaggataggcatgtttttactaattctatgggtacagattagttgaagaaactacattcctatgaataagaaattcagatttcagtgttaagtaatgttgcttacattgtgtgagtgacagggcagtggtggatctgagagtgtggcaggtgcacagaccaagtgagtcagaaatcaatatggaaaggtgagggtctgtggatatgaactgaaagtatgtaaatacttgacaaaatactaataaatggagttcaaaataacccaaaattgttctaaacacaaattccttgacaattactttgggagtagagagttcataatggactccaaactcctgctttatcttctgattcccattgtctgtgagatgagaaaatcagctctaattatgcatcacagggcaaatctgtaaatcaagagtgttcaatagaattgaagaccctgggggatcaggacatgaggcaggtgctggagacagtgtctcaggagcacccagtagatctcagaggtccctcctggacactcatgtgggacataagcatcactttctcagagtcaccaatgagctgtgctggtggctgatgggtccaggaaaagaccaaggcacctgctcagtgtgatggagagtgatggttccaaaaatgatccaggtggtctctatgctaatcaaatgtaggctcacagtgaggagcctgttctatatgggcttattcttcagtgaaaggacgtctgtccacaaatgtttgtaaatggagcagggcatgcatttcctcaagcaggattagggcttcgaccgtctgcatctcactcttgttaggctgatgtgtcatttatcttccctttcttatcatggattgggctttgagctaagaaaggctttgtcttatgaatatgcaaatatactgatatccactgaggtaaatatgttctgtgccctgagagaatcacctgagagaatcccctgagagcacatctcctcatgggctggacctgcaagatcctcttcttggtggcagcagccacaggtaagcagttcccaggtccaagtaatgaggaggggattgagtccagtcaagggggctttcatccactcctgtgtcctccccacaggtgcccactcccaggtgcagctggtgcaatctggggctgaggtgaagaagcctggggcctcagtgaaggtctcctgcaaggcttctggatacaccttcacctactgctacttgcactgggtatgacaggcccctggacaagggcttgaatggacaggattttagttatttgagagatttttcatacaacatttattctgtaagcaaatttcagggattgtagaatgaatcatattaacaaatctgacacagaacttcctctgaatcaatctttgtaaacatcaatttctgaatcaatgttgtaaatatttcagaacacaagcacaaattcacattttaactctacttttatctctatttaaaaaatatcaaaaaatctcattttgtgcatgtaacgttttgaatgcccaccatcaatgcatgacatttcttgtttttccacattcatgttaccatttatcatcatgagaattgtgagttttagccatgctgataggtgagtaatggcatctaatttttatttaaatgcacatgtcccaaataaaaaattcgtattaaacaatttttatataatttttgctgggatgcctttcctgatatgtggttcatttttatctgcattgttttcttttcattagttgtaagtttacttgcatattgattataaaagtcacttaacaaatccaaagaattgatttaacaaatagatgacttggaagtattttctcccagtctgtggttgtctttttctctcttatcagtgggtatttcaaaaaatatatgtgtgtctgtgtgtctgtgtgtgtgtgtgtgcacagatttagacaaaaaacataaaaaattattcattcatagatcatgtatttggcattatatctgaagtctcattataaaatacactaatagtgattatttattccatgttgctaatctcaggccacaatcaactcatgagtgcttagccttcacctattgattggaggactatccacctgagatatttggaatacttccatgaggagatgtgttcttcttcccatcatttctttatttaatcatctattaacatccgtattggtttatggacatctatttcatactctgaagaagatccatgctacattattcattttcttgttcaaatctccacagctttattaggtgctgggacctcatttagtttggatcctgcatccttacagcaaagctcatccttttgtttttgaacacttccctgtttcctgatattacgatagattctaagcttgtttctttatcacctttttcatacatagaattagccatttatataaagattgcttgtttctgattttaaagagtagtgttaaaataaaatattgtgataatgggtatgtgtgttgttaatgtggtataagtacttctgggacctctcaaccttctgttctagcaaatgtgcatgtttatatgaatcatgtcatgtccatatatccaatgttgaactatgttgcgaaaagtgatctcaagataatggtaattatcaaccccctccctaacaaggtgtagatctgcatttttttttcattgtaactcaactttgcctcatggtcaggaacagtggtttccagctctaaatgtactgattacagcgagatgtccgttttccctggaaatgtatttttaagttcttactggatgtatttgttgataatgttttctactatgaagatacctgaacagtgtccgcactagagagtaagaaagagtaatgggcagattaaccctgtgcatccagacccaggaatcctctgatcctgccctccctgaaacggagacacagaggatggatgagcaatgctgagcggtgcacccaagaccacaaaaagaaagacatggaaatatgtcccctcccctcctcaagaaaggcagctcatcccctgttccctcaggcccgggcgaggagccaccccatgtctcttcccttcctcagtgtccacactgtggggtctgcactgatctgggcttcccttctcatcaccctcgtattagtggcccttgtgaatcaggtccagctgtggctgctgctcatggggctgctctcagtctgctctctctgtgtttgcagaagtcctgtgtgaagtttactgatggagtcagagggagaaagattgtacagcccagcggttcactcagccactcctgcaaagactctggatcaccttcactgattgcagcataagcttggtccagcaggctccaggaccagagttggcgtgggcagcaacagggagaaattcaagaggaagttcttacatgcacccttacgtgcacggtctcactgagatctttacttcctttatcacgtttgttctgtaaatcacaacgaatggtgcattcttcatctattatacacttgttaagtctttttttggcatcttttaaaaaactggtaactttatcctgtgtaatatccctgttaagtcctaaaagtcttttttgatgtctattttttcttaactttacacagctactatagatttattttggttcatatttttgtaatccatgttttctcatctttagtttttacatttgtgaatacgtacagtaattttctaatacatagcttctagttggggcttgctttttaaaatcaactataataagctctatttttaaactaatattatttttctgttatattgtttaaattagcatttcacaatgatgtttatttctctactaacatataatctaattcacttttataaatattatattggttaccataagttttacaataagaattgtatataattagattctataagaattgtatataattggattctaatgcagatactgtgatggccttgatatgaagaacagagacagtgtaactgtgtgctttgaattcctccttctcactgctctttcttgtttattcccagtttgcacttacatatactataaaacataatatataaattttttattcctttcatagttatataatatagcaattacaaagataaaaactgcacttcatcttgattttcccattttgtacagtcttaatttcttcgtatagatttatgttttgaatgtatatcacacggctactagcagagaaagtttgttaaaatgtgcactgaagcatgaatgtgctgacaataaattgtctcaagatctttttgtaatgacagaattttatttgcctttcacttttaatgaaaatgtaatgcacgtagaattccagtttgcatttcacttgtaatttattttcttgtgtttattattttgttcatggagatgatcacacattacattctgctgggcctttattaaccacatttctatgaacctagtcagggttgggtttcaagtgtatggttgccacggctatcagagttgaagtcagcttctcctgttcacaaaaagttcaggttcctccagtgatacccacttttgtgtcccggtttggctcttcccatttctttctccccagagagagcctgtctctttcatctgtggcaggtgcatcctgctgacacttttacttggtgattgtttgtggggtgaaggggcttggacacagggggatgttctccaaccttctgaccaagcatccttcttagctatgggtggtgagagtggctctgaagcatggtcttccaagcgttcctgttccttcccttccccaagtcagagtgtctctttctagccacagtggtcttccatcagtgtcctcagcttctgacccactgtccttactccacagactcagggtttcattcctcaggaaagagacgggaggtgtttctgggtagagtctccttggtgtcctctgtttccttctgttctagttgattctaccagtgcctgaaggacacaagatttaataaatgtctcccacatatcgtgaagagggattcagcattgaacggagctactgttcttcctccccagtcaacaccacaggacagcaggtggctgagttgtctggggatttccccaattctgtaggaaaagcccgcaagtgccagtagtttcacactctcacagcgttagcacacacatcctcaacaactcatgaaacatttccaggttagctttttcctatcttcaataccatacaatgagtggcacctgccccaggtactctaataaatggacctagttttctctgcaggctccccattttctcagatttcagggtttttttctctgcaacatcaactcagatatgttgaagggttcattttttgtagttcttcaaatttcttgttaatgaggtcagaagaagatcattttctcatttttttttttacattcccgtgcttagtatctgctttctaaataaaattcggaaactaagacaaaatatcaaatatccactatttggtgcattgttaaactatttgagaaatattcatgtactgaaatacaatgaacaattgaaatcaaggcatgcctcagtcacataagaatgtgaggacattatcaaataattgtgctgagtgaaggaagctaaagaattcacagtaaatctcctgtgatttcttttgtataaattgtagaaaatgcaactattctaaattaacatggagaagatctgaatttttctgagaaaagtgtggtgaggtaacaagatggtgaaataaaattacagagaagtgagagaaaaaaatttggaggttaatttaattgctaatagcacgattgaagtgctgattcaaaggctgcacacatataccaacattttccatatcgtacactataaatttgaattcactattgattgaatttttgaataaagcagtaacaaaaatgagtatattggctgaggaagagcaagaaagagatgaatattgacacttgaataatcacggactcctgaaaatacacacatgtgaacactgattgcatatttcaggtaaatactagaaaaagcaaagtcacataaagtcgttatgacaggtgggataccctgcaaatcacactaggcatgtcccacactgccctggagctgtctcaggggagcagtctcctccagtgtttagaggcacaggcacggataatagggctgacgctgtccagatgtgtgatattggacacattgcacaactgctctgttatgtatgtaattcatcttctctaaaaatgtaacattgacacttgcactgaatatattctgcaaatatgtaaacattaaataagatgatgactgctaattgatcatcaagtcacaatcacataatctgaagttatattttcctgagagataggattacctccagtgttttccgggaccctctcatctgctctgggcactgccctctcctccagcgtcccactagagcttgctatatagtaggagacatgcaaatagggccctccctctgctgataaaaaccagccgagcccagaccctgcagctctgggagaagagccccagccccagaattcccaggagtttccattcggtgatcagcactgaacacagaggactcaccatggagtttgggctgagctgggttttccttgttgctattataaaaggtgatttatggagaactagagacattgagtggacgtgagtgagataagcagtgaatatatgtggcagtttctgaccaggttgtctctgtgtttgcaggtgtccagtgtcaggtgcagctggtggagtctgggggaggcttggtcaagcctggagggtccctgagactctcctgtgcagcctctggattcaccttcagtgactactacatgagctggatccgccaggctccagggaaggggctggagtgggtttcatacattagtagtagtagtagttacacaaactacgcagactctgtgaagggccgattcaccatctccagagacaacgccaagaactcactgtatctgcaaatgaacagcctgagagccgaggacacggctgtgtattactgtgcgagagacacagtgaggggaggtcagtgtgagcccagacacaaacctccctgcaggggtccccaggaccaccagggggcgcccgggacactgtgcacggggctgtctccagggcaggtgcaggtgctgctgagggctggcttcctgtcatggcctggggctgcctcattgtcaaatttccccaggaacttctccagatttacaattctgtactaacatttgatgtctctaaatgcaatactttttttgtcctttttgtttctttgtttttttgcaacaggagtacatatcctcagctccacagaagccagggtgtcactttgggggcagaaataatcctttcatggttaccaggataagagtcctgaggaatcccagggaaacctggagagtgttttccagttagactcagggcagagacctccatgggaatctctgattagaacaggccttgagctctgacgggagccaagagagaggctcgcccagggtcagagtccttaaaacctgatggttttcacagctatcccccctcgtcttgtaaactcagactgattcagttgaccctctttctgctaatccatttccttctctgtaggtttgattctcacagttcgctttcttcttctcttccctgaaaacagacgatgtgttttctgtagtcaaaatcccagggctcaggtctgcaggacctgggtaggctacggggactttctcactcaccattgtccggacactcttgtcttctgtgcatggaggcatttggaaaatgaagtggacattagccatgaagggaataatactagttttctccaataggatattgatgtagagctgatcttgtgcttctcacactgtctcagagtttggactctcacctgtgactttgagaagagctggggatgggcactccattgtgctgtgagctctgggtaacgataattgtagaatctgcctaggcagtctaaggtcaatactactcgtcatcaggaaagacagctggaattcctgggaagatctgcatctgccgtccaccatggagtcccatcgtcttctgttatgctctctttgaatcagtcccacctagattatctagaacactcttcctgacttaggaaaaataatggcaggctccactaacacctgtgttatgccatgggagcaacacctaagctagtgtgtgaatgagtagatgagactgtggtctagtcaaggtgacaggtaaaattgattgttgccattatgatattttattttatatttggcaatatagtcatgctcctattataaatattctttgagacggagtcttgctctgttgccagcctggagagtgcagcagcacgatctcggctcactgcaacctcttccacctcccaggttcaagcagttctcctgcctcagcctcccgagaaactgggattacaggtgcacgccaccatgcctggctaatttttgtatttttagtatcgacagggtttcaccatgtgggccagtgtggtctcgatttcctgacctcgtgatctgcacacctcggcctcccaaagtgctgggattacaggcatgagccaccacacctggcctagttttattaatgtctgcccataccagcaactacatacctatggggacattaatttacatctgcagacatatgtgtaaatacacaagcctatacatacatgtgtagccatttatatttaacattataataaaataattctaaaatattttctaaagaattaaacttaatgatgagctaaatataaattagagtaatctataattgatttcgatcattctctatagtttgcataaatggatgtctatttctaagccttaacatagtgtattcgtcattttaaaatagtcaagaaaaaattacaaatgttcttgtcacaaaaaaagataaggatttgatgatttgaggtaatatatatgtcaattaactcgattcaattattccgtattgcattcacaaaccataacatacctttgtgccccataaatatatacaaccaaaatttctcaattttcaatgaaattttaattatatatttttaaatctgatgcctctccttggattaagccacctcctcaggcttacagggctcttccattttctcaacatgttgttataccagatgagcacaaacacattaatttcattatgcttagctttaatttttcaaaacaacataaaggtgataattttaccaatagacgtattacaacctactgtgcatgagaccctttctgtgcttcaaggtttcttctcaggactttatatgtattgcaaattttcatttttttctgatatggaatgctgatttctctttattatagattatcagtttatttttcaaatttatctcttaaaattaattttttcaaagtcccactcaaaccagggtattattagaactttgacgtgtaatagttggaccaactttgagaatacattcaatttagttcacgtgctctcaagcatcttttcttctttaaaagttgttgtcagttgtaatatcacacaaaatattagtaatttatgctaatgacaggttaaaatgctgtataaataattaaattacatttgattggaaaaaaggaatagatgttcctcatatcttgactttttttcttctctatgagatgcatgcttattaattattaagtttaagacgttacccttgtctttttgatttctgggatttaattttagtacatatacttgaatgcattgtattaattcatataataatgttcatattttggatagggttttaatattaattttattattactgaattttaaactattctacactttttttgtttttatgagataaaatttacatataagaaaatatgcatagatctggaatgtatcactagagagtttctggcaaatgtgaatacccttgttgtccccagcacctaaggtagctgaagagcaagtccattcccacatcgcgggtctttccctgtgcctgaggtcagctcctgcatggggaaatgttttgatttctcacactacagatccatttttttctgttttgaactttatataaatggaatcaaacattatagacctttttttggaaaggagctttgctatttttgagattaattcatgctatttaatgtgtaaaattagatcaacatattgtcatttatttaattcatggactgactctgatatgaaacctcaaagttttcatgtatatatggagacagggagaggaaggagaaagattttatatctgagtcagtccattaagtaaataaatgagaatattttgatttattttcttgtcgatgtactttaaatttgtttccattttatgaatattataggcaaagctgttacaaatatattagtgtaggttttcctatgttgtctcatttttattgagaaaatatgaagtatgtatttctttatttttttatttttgattattatttatttatattttaaattttactttaagttctgggatacatgtgctgaacgtgcaggtttgttacataagtatacatgtgccgtggcggtttgctgcacatatcaaccagtcatctatgtttgaagcgcctcaggcattaggtatttgtcctaatgctctccctcccccttcctcccacccctgatgcatcctagtgtgtgacgttcccctccctgtgtccatgtgttctcattgttcaactcccacttttgagtgaaaacatgcggtgtttggttttctgttcctgtgttagtttgttgaggatgatgatttccagcttcatccatgtccctgcaaaggacatgacatcattcttttttgtggctgcatagaattccatggtgtatatatgccacattttctttatccagtctatcattgatggttatcacatggttatcacattctttggttttcatttaggagcatatgtcttgagtagaaatttggtcctttccacacactaagcctcaccttcctcagaggaagagcagagattcatccaactttgtctgaggtgggagctgcttctccacaccttggagcttgcagagacccctaagtgcagcttcattgagtcaggtgtgtctccatgtgggggacttctgctgccagtgattgctgctcagttctaattgtgggttcggaattaggacacttaggttatcacgcctcaaaaattaccatcattatagagaaaaataataatacaatgctaatcattgtcacttattacttattattattggagtataagtttggagagacaaaattgttaccatatatttgcataaatgtaatgtcagaatctcctgaatgggtcttgaacacttacaaactggatagaagcagattcttattttttttctatactggtgtattttgggatgtcaacattttgtccagaatctgtgagtaccaataactgtgtgtttcaagactcttcttgggttctgagacaagaaatgccattactacctgaaggattgagacaactttgaacaatgtcagagcaatcatctctaattgcttctaaacttcagttttatcaattcttatgctctctgaattatttctgattttagctattaaaggattctctctttttctcttagttaattgagctaagaatttgtctatttttttagaaaaaatctctttgatttgttgatttttctattgcttgtaaagtccatttttcacttacttatttcatttactctaaagcctcataaacacattggtgacatgtagatagagaatttgatcgtaaatgccatgtttttgttagactcagctgatcatgtcaggaagccccctgagggttctaggaactgactgtggctcccaccactggacaaggatgagaacctccatgctttggggatgggaggacatgcagggcagtgtgaggggaggagggttgctggcaggtccagcattgcttcccctggctgcaccactcatgtccttcctcactcagagattcagtcatttcttcccaggtggaaaaatcagttaactttatctttgatatatggatgggagcccaagatagaggcttgtcagtcattatttctgtgcctgctgccttgggaatgtctgaatttcttatgctctgtcctgggtctataccccagtggctcccctactccatggcacccacctgtgcctgtgcatggcccctgatcacagcctccgtgaaacatctggtttggctcaggaagaaccccccttgccttgttttcctgctgtccctggtccacatccttctccatccacaggctctcagtggtgcctcccatccacactgaccctacatggggtcataccttgtccaccacttcctctctcttttcttctgagccttgcctttgattccaacagcctgtttccatctcacctggacttgtgtacaggatggggtttaccgagcaggcttgggttgtggaaaccctgaacattactgaaaaagtgctttctcaagccaggtccatattcagctcctgggagatgatatctgttttttgggcatagacctcccggtagtatttttaaaccactttattaaagtaaggtttatatatgtaaaagtatagattatttaacatacttaattcattgagtttgaagtatacatctgcaaagctgtcaccacaatcaaggtcatacccatagcactcacttccaaaacattcctcttatctctattactattattattagctaaaatgtatttttgtttgtgtttgtctgtgtctctctgtgtgtagcctgggtgcacactatactaggtgttttcataatgacttatggtgaatgcctattattgctcaagaggccggcgtctgagcactggaggtcagttgtacaggtgccacacacatctgtgatgggccccaataaacagcactgggcaccagcactcaggtgagcttccctggtggacaatgcttcacacatgttgtcatgcatcactgctgggagaactggggacaagagactccccagggaaagaacatctgagagcttgttcctggattctcagggccttccccttgctgcctttgttcattttaattcatattcatttgcaataataaagctgcacccatgagaataacagctcgtcttgagtcctttacttctattatgtggcctgaggatggtcttgggatgctcaacacaattacatcagaggtggaaattgctagaaagaccctgactactgacacatggctagagcattgtttatagtatcaaaggatgagaaagtgtgggataaaagacattcaatacctggatgtctgcagaatcacatggcaggagatggcgtgtgtgctccagtaaagaggaggaagtgaaagtaatcaatggaatttggaaatggcagacacagctccctaggagttgttccctgaataacaaaaagtaaaaataatgaggaacaacccaaatattcaagtcatatctgtgatagctaaaataatagtaaaaagatgcacatccagccttgcactgtgccctatgagctgaggctactagactcccattcaccaccaaaggggacagttgtccagaaacaacacacaatacacaacagccacacagaaggtagcccaggggctgggctggggcagagaatccactagacaactagaacaaggaggacagtgtggaaagtggcatcattctgtgatatgattgatatcattaactgatatcatcggattgtgaacaatattagccaatggactatgagagtgactgatgtagcagcttgtctttggcttcatgtgctgcagaaaggaggagtatgtttgggaggatgctggacccacagctcacaacagacacatcacagatggctctagctgattgcaacctcaaataagatgttcctgatgggtcagctttcctggtgcactggattccagattgtgtaaaatttctctaccctgagaatgagactgcccttcctctctttgaaatgcaaagtgggctctccagatagggaggctaatgctgcacacggaagccctgctgctgtgtgtttatgttgatgctgacagtcactgcttagcatgcaccttacccaggtcatagcctgtgctgtgtgtttatgttgatgctgacagtcattgcatagcatgcaaattacctaggtcatagcctgtgttgtgtgtttatgttgatggtaatggtcattgcttagcatgcaccttacccaggtcatagcctgtgctgtgataaagagaagtcattttgcttctgcaccccaggtatacaattcctgtgggtaatctggcaaatattttagaaactgtgtagtttctgttgccttggcttttcatttggatcttttagatgttaaggaaatgagagtggttcacaggaaaatggggcaaatacaggggacagtaaaaagccccctccgagcaatgtggatatcataaaataaaaaaaataagaataaaagaactaaacagattgtgctggggtggaattaaaacagcactaccaggagttgggtgcagcaatggggatcccttcaggtccatcagcaatacagagacctaaacaaatatttcctatttaggttgaattggcagagtgtaaaatctagaagatgaaatggccaggaaacatttgtccttgattttgcatgggtgaaggtctggcaggttaatcaaattgagggttgttaaaggcctggggtggtcctgccctttctgggtgcccaggccatagtcacattcatgggaaattgccatggaataaagagtagttttttgtggtagttcttgttatcaggcataagtgcatttgaattttctgttcacggcctttcctggctctatttctcatttttttaacagacatgattttatctagatttgtcaactttcacagggtcacagagaagggtggaaggagggatgccctggtttgggtcttgcaggaccacagacaagagtggggaggggcaagaagaggttgtaaggaattattgagacctattctgcccctcccaggaggctcagttcagccttttctctgcaactgaggttctgggttataaaccctgtagactcttcccttcaggtcagggcggcaactatgcaaatgcaagtgggggcctctccacttaaacccagggctcccctccacagtgagtctccttcaccacccagctgggatctcagggcttccttttctgtcctcctccaggatggggtcaaccgccatcctcgccctcctcctggctgttctccaaggtcagtcctgccgagggcttgaggtcacagaggagaacgggtggaaagcaactcctgattcaaattttgtgtcttccatacaggagtctgtgccgaagtgcagctggtgcagtccggagcagaggtgaaaaagcccggggagtctctgaggatctcctgtaagggttctggatacagctttaccagctactggatcagctgggtgcgccagatgcccgggaaaggcctggagtggatggggaggattgatcctagtgactcttataccaactacagcccgtccttccaaggccacgtcaccatctcagctgacaagtccatcagcactgcctacctgcagtggagcagcctgaaggcctcggacaccgccatgtattactgtgcgagacacacagtgagagaaaccagcactgagcccgtctaaaaccctccacagcacaggtgcagaggaagctgccagagacacactccccaggggcctctctattcatccagggaggaaacactggctgtgtcctgaggagtgagaaccagagaacaacgtgggagggttcccagtccctaaggcaactagatggggcacctgctcctgggaggtggattctctgagggggctcttgttctacaaggttgttcatggtgtatattacatggttaaaataaaaaagctgtctaatatgcacctcttaagcatgacagtcttttaattagtgaaaagtctacacagttaatcattgctggcatgctttcctccctcctatcttctcttgctccctacatctattattttctacttaatttttcaaaatcatttgatccctttgtgaactattactaggttctgttgtttttgttgttgttttcctttcaataatatgtactgaataattcatctttgtgccaattcataagttcttgggtataataaatacttctctcataaaaattagataaattaaaataaataaattttaaaaaacatacaacctatcaaaactgaaccattaagaaataaaaaatctgggctggttgtggtgggtcatgcctgtaatcccagcagttttggaggctgaagcaggtagatcaggagttctatgtgaatctgtggtcaggagttcaagatcagcctggccgacatggtgacaccaagtctctactaaaaatataaaaattagctgggtgtggttgtgttcacctgtagtcccagccactcgggatgctgaggcaggagaatggcttgaacctgagaggcagaggttgcagtaagctgaaattgagccactgcactccagactgggaaacagagtgagactccatctcaacaacaacaacaaaaaaatctgaacagaccaatgagtaaagagattgagtcagtgatttttcaaacatctcaaatcaaagaaaagtcaaaaatttcatggctccactactgaattttatcaaaaattaaaacaaaataactagaatcactactcaaatttccaacaaaataaagaggaagaaatacattcaaacttattttggaaggccctatttccaaagcaagggaaagacactacaagtaaatgaaactacaggctaatatccctgattatcatagtttcaaaaactctcaagagtgatgacaaacaaaattcaacagcacattgacagtataattcactatggtcaggtgtggtttatctctaggatgcaatgaagtttcaacctgcagaaataaatgtgatatatcaaatgaaaatattgaaggactaaaaccatatgcaccatatgtccatgtcaatagatgcagaaagagcctctgacaaaatccaccacactctcattataaaaaatctgaacatattatgcataaaagatatacagctcaacataataaacaccacatatcagaagtgcacatctaacattatcctcaatgatgaaaattttattttcctctaagactagaaactagacaagatgctcactatcaccaatattattaaacacagcactgggtggtctagacaaaataggccagaagaaaaaaatagaagtcatccatatagtaatgaataaattttaaatatatgttttacatattatatgctcttctttatgcaaagccctaaagactccaccaaaaaaggctggatgtaatgaagagattcaataaagttgcagaatacaaaatcaaacttacatttcaagatggcaggttagaggcattgctagtatacctcttcctcttggaaggacaaactgatatggagagatgaacattgtggatttattttcaagaagcaatgcaggaactgaacaaaaacactgaaataatctacaaactttccgaaaaaagcaggaagctgcagcctacactgtgagtcaggtgaagggctgcgagtccccagagtttgagggaagagtttgcctctgggatacacatccacacctgggatcctgaaagtccaggccaaaggagaaggccccaacctcacccagtgcaaggacccactgtgcagggttgtggaatataaaagtaggaacagcaggaagacccttgcataaactctcagatctcagtgcggtctgagagctgccatttcttaaggttcttcacagaggaccctgggaagaactgccaaaaatttcaggcaggggtcacaggttgaaagaagctctcaacaggggtgtgtgatataacctagaggggacgaactcccttggccagagtctgacaagtgaagagtgaaaagtgggctgcaagttcaggagccatgggtgcaggagctggtgcctggctttgcagcagacaggaaggagcatggcatgaaacccatggctgcagtctctatggggacagcttataactcctggcatttgcagatattgatcacaggctgactggaactcatctcactgctgccaatggaacaccacaggagtggctctgcctcaccaagtgtgtgggaactgtatggggcttaccgtcacctggctctcaccactccctgcacaaacttctatgcagcagaagcagatgtgctgacctctggaacatcaacccagtggcctgagaaccacccctgtcccccacacccacaggggctgctgcttgccctgcacacagagactcagagcagaaacccacctgacctagccctcaccttgctttgtgcagccacctgccctggcaatttaacacaaaggacagcatcttttgggagctacatagccacacccactgcctgagaatccatagtagcccccattcctgggcaacataaggcttgcaaaaatcccactgctaataatgcagctggtgctctttcacaaacaccacctcttagctggaggccaaccaaccatgcattacagtatctcctggtagagtaacactgcatcccagaaggagaaaatgactgtgcgatctcagctgtcaccatggtctgcaccactctggatgaacgggggtcccgagtctgtccatgtgaccagttcatcactactgtaaccagcattcaagaaagccagcataagaaggccatcaatatccaaggaatttcacagagtctccttcactcccctgccactcccatcagacccggttctgctgctcactgttgaaaaatgtgaggacagttcacatcaccggatcacttacagatatttgccaacaccagcttatagacagcctttctggaatacatcatggtgactgcattcctcagaaggcgcactctccacgttctggcttgcaagagacacagagtcacaattcccctctattcggcacatcaacatttgtacagatgaaaagacatgcctgtcttatctgaatagctggaatactgtctgaaaagtggatagatttcctactgatctggcaagagagctgaggttgctccaacccttccccgtgataagacctcagtgtgactcactaaaagctcctccagccacccctgtcaaggctgggacttaatttacccacctgttttagccacaactgctttctacccagggacaagtcccccattggtctgaagcctgaaccaacaaacaagtaaacaaatcactggggaaaagcaaataaacacgggcatgccacagatgaatgagataagatttaagagacctcaaccattataaccccatagaagacaatgaacttgctcacacactgagttgatttctactgcaaccaccacataggaaagcgatcacgcaaagactctgtataaccagggagctcctacagagtcttcattcccctaaggaccaaaaatcaaatcaggctgtaattaattataagcataaaaaatctcattcttaagggaaaaatacatttaaaaacaaacaaacagtcaaatcaaactagaaaatctaccaaaacaagaagaaatgagaaaaataacttgggaaatatgagaaaacagggtggtataacagcgcaaaaaggtcacactacctctccagcaataaaccttaaccaaaatgaagtctttaaaataccagaaaggaaaatcagaatgttgattaataagctactcaagaagatatcaaaaaaggtgaaaatcatcataaataaatttatataagcagttcagaatataaatataaatttttatagagagatagatatcctaaagagaaaccaatcagaacttctgaaaataaaaaaaaaaatgcagagaattagtaagggaactacaaaatgccatgaaaagttttaaaaatagactagaaaaaaagtaaaatattaggagaaaaagaaaaaggaaacagtagaagaaaaaaagaagaaaaaagtagaaagactagactatttttgaaataacccaatcagataaaaataaatataaaaagagccaaaagaagtgagcaaagtctccaggaaatatgggattatgtaaaacaaataaacctaagaataattgatgttgctgaagaagaaaaaaataataataagtttggaaaacttctttgatggaataattgagaactactcccctgggctgactaaagacctagatgtccaaatccaagaagttcaaggaactcctggaaaactcattgcaaaaataccttcaccaaccatacagtcattaggctacctaaagtctacatgaaggaaataatctaagagcagtaaaacaagacaaaacaaaacaaagaaatccatcagactaatggcagacttctcagcagaaacttcacaagccagacagattaaggttctatcttcaaactccttaaacagaacaactttcaaccaagaatttttttttatcctgtcaaacagttttataaataaaaaaagaaatagtcattttcagaaaaaaaaatgctgagcaaattcgtcactagcaaaccagcactacaagaaatgctaaaaggagtcctaaaccttgaaacaaaagcccaatacgcacaaaaaatggaacctcttaaaaattaaaaactcacagggcccattaaacaatgacacaatataaaagaaaacaaaaactaggtaacaattaacatgacaaagaaaatagtaactcatatctaaatattcacattgaatgtaaatggcctaaatgctccacaaaaaaaatatgcaactgcgtactagatttaaaaagtcacaatggaaatacctgatgtctttaagagacttacctaacacgcaaagatttatgtaaactcaaggtaaaatggtggcaaaaggatttcaacaaaaatagaaaccaagactgagcaggaataactattctgatatcagacaaaatggacttcaaagcaacaacaataaaaaaaaagacatagatgatcactatacaatgataaaaggatcaattcaacaaaaaattacaattatacatttatatgcaccaaacaccggcggaactagattcatgaaataagtactactagacctcaaaaactgagttagatagcaaatcaatcatagtgggagacttctatacaataatgacagcaatagagagatcttcgggacagaaagtcaagagataaacaatgtccttaaatgactcactggaagaaatggatgcagcagatatttacagaacactctatccaagatctgcagaatatacattcttctaatcagcacacgcaacattctccaaggtagagcatgtaataggccacaaaacaagtcttaataaaatttaaaacaatgaaatcatatcaagtatcttcttagaccatagcagaataaaactaaaaatcaactttctaaagaactttcaaaactgaacaaatacatagaaatgaagaaatctgcttctgaataatatctaggttaacaatgacatcaagaagaaaatttaaaaattatcttaattaaatgataataatgagacaagttattgaaacttcaaaaataaagcaaaaacagtgataagaggaaagtttatagtcccaactgcctacatcaaaaagtctgaaacagcatgtcacaactcaagaaagtggagaaacaagagcaaaccaaacctggaggcagaagaagaaaagaaagaacaaagatgagagcagaactaaatgaaattcaaacaaaaaaatacaaaaaaattcaatgaaataaaagctggttatttgaaaaaataaacaaattcatggatcatcagctagattaaccaagaaaagaagagcaaagatacaaataagctcaattagaagtgaaacggacattacaatctacataactaatataaaaaataatttagaaccaccaagtacatgttcatgtacacaatgtagaagacttagaggaaatggtcaaatttctagaaatctacaagtctcatagattaaatcaataagaaatagttactttgaatatataaataacaaagagtgagattgtatcagtaattcgagaattgccaacaataaaaacaacaacaaatagggccaggtgaattcacagttgaatgttatcaaaaatttacagaagaattgctaccaattttgctgaaacaatttttttaatttagaaaaaaagaatcctccctaaattattccatgaagctagtataaccaagataccaaaaccaggaaaacacacatacacacacacacacacactctctctctctctacagatgaatttccctgataaatatagatgcaaaaatacacaaaaaataatagctatctgagttcaacagcacatcaaaaatacaattcctcatgatcaagcgggtttcatctcagaaatgcacaattatttgaacatacacaagtcaataaatgtagtacatcacataaacagaattgcaaacaaaaaccttatgattgtctcaatagatgtagaaaaagcattgaacaaaattcagcatttttcatgataaaaacctctaaataaacgaggcatagaagaaacctgactcaaactaataaaagttacatatgaaaaacccacagccaacgtcatactgaatgcaaaaaagttaaaagcatttcccctgagaacacaaacaatacaaggatgcccacgttcaccaattttattcaacatagttctggaagttctagccagagcaattagtcaggagaaaaaaaagtatccaaattaaaaaagagaaagtcaaactatcactgtttacagatcaagtgattatatccttagaaaatcctagactcctcctaaatagtgttagttttagtaaatgaattcagctaattctcaggttacaaaataaatgtacacaaattagtagcaccactgtacattaacaacaacaaagctgagaattcaaccaagaactccatccagtttacagaagctgtaaaaacatagaatatttagcaatatacttaactaaaagggtaaaagatctctacaaggagaactacaaaacactgctgaaagaaatcatagatgacacaaacaaatggaaatgcatcccctgatcatggattggaagaattagtattgtgaaaatgaccatactgcccaaagcaatctacagattcaaagcaattcttaggaaaatacccacattactttctacagaattaaaaaacaataatgctaaaatttatataaaaccagaaaaaaagcccaaatagccaaagaaatcctaataagataaaaaattggagccatcacattactgaacttcaaattataccacaaggctgcagttaccaaaacaacatggtactgatataaatgtaggcttatagaccactggaacaaaatagagaacccagaaataaagccacatatgtaaagccaactgttgttttgcaaaacataccaaaatatgaattggaaaatatacactgcatttaataaatggtacagggaaaactagcaagccacatggaaaagaataaaactggatttctatctgtcaccatataaaagaccaactcaagatgaatcaaattcttaaatataagacatgaaactctaaaagttctagaaaacaatattagaaatcacttttacacatcagggtaggtaaagaacttataaataagaccccaaaagcaaacgcaacaaaaacaaaaataaatttatggaacctatttaaacgaaagtgtttctgcacagcacaaataatagtcaacagagtaaaaagacaactcacagaacgggagaaattatgtgcaaacttcacatctgacagaagattagtatccagaatctacaaaatattaaaacaagtcgccaagaaaaaaacaaataatcccattcaaaagaggacaagggacataaatagatagttctcagaagaagatatacaaatggccaacaaacatataaaaaactgtgtagcatcactaatgatcaggaaaatacaaattaaaaccacaatctaataacacctaatcctgcaagaatggccactataaaaagtcaaaaaacaaaagggaatgcttatacaccgctggtgaaaatgtaatttagtataaccactgtggaaaacactgttgagatttcctgaaaagcaaaaaagtagatctactgttttgttttgttttttcttttttaagatggagtctcgctcagtcacacgggctggagtgcagtggcgcaatctcggctcactgccacctccgcctcccaggttcaagagattcacccgcctcagcctcccaagtaattgggattacaggcacccaccatcatgcctggctatttttttttttttttttttgtatttttgtagcgatggggtttcaccatgttggccaagctggtctataactcctgacctcaggtgatccttccccctcggccccctaaagtgcggaaatcacaggtgtgaaccactgtgcccggccagatctactgtttgatccagcaatctcagtactctttatttcaaaggaaataaagtcattatatgaaaaagatgtgtacatgtatgtttatagcagcagaatttaacattgaaaagatgttgaaccaatttaagtgcctattgactaatgagttcataaagaaaatgtgacatcgcctgtaatcccagcactttgggaggctgaggagggcggatcacaaggtcaggagatcgagacaatcctggccaacatggtgaaactccatctctgctgaaaatacaaaaagttagcagggcatggtggcgcacgcccgtagtcccggctactaaggaggctgagccaggataattgcttgaacctgggaggcagaggctgcagtgagccgagatcaggccactgcactccagcctgggtgacagaggaagacactgtctcaaaaaaaagaaaaagaaaagaaaatgtgacatacttacaccatggaatactaataaaccattaaagggaatgacataatgtcttttgcaacaactttgatgaagcttgaggcaactattataagtgaagttacagcagagtggaaaagtaaaaactctatgttctcacttataagtgggagctgggctatgaacttgcacagacatacagcgtgatataagggactttagagacttagaagggaaataataggagggacactagagagaaaataaatgcactttaggtacagtgtacactattcaggtgacgagtgtactaaaatctcagaatttattgctatgtaattcatccatctaacaaaaaaaatctttacccctaaagctattgaaattaaacaaaagtcaacctacaaaaataagtatcttccgtatacactaaaaaatgattattcaaaattaaaatcaagaaaataaatctaaatacaacagcttaaaattcataaaataaattttaccaaaataaatttaacaaggatacaaaacatctgcacattaaaaattataatatattgattaaaatggaagaaaacacaaataaatggaaggctatcttgtgttcttgtgttactggaacatacattgttaatatgtccaccctaacctaagcatttacagattcaatgcaatcccattcaaaatttcaaagacattcattcacataaattgaaaaaaaaattctctaatttgtatttctggggtgactgaccctgactatcaagttgaaatcagactactactccacaatggaggtaagaaacagtatgtctggaatacaggagatttcttagggcatctcttagtattactttaccatgggattaaggtcaatgggaaactacaacaacctaattcaggcaggaacacaaatggcccaggtacttcagaaataaaagtttgggtcactcaaccaggtaaaaaaaacctgactagccaaggtacttattgaaggcaaaaaaaaaaaaaaaaatacagaatgcgtgctagaagaaggtagttatcaataccaggaacaagcatgctaccagaagtgaggactctaattgttatgagtatttcctccttatcttgttaagaatatatttctgcatgtatataactgtgctaagaaaatatcttcaccgtggcggatgtggtggctcatacctgtaatcccagcactttggaaggccaaggtgggtggatcacctgaagtctggagttcgagaccagcttgaccagtatgatgaaaccctgtctctaccaaaaatacaaaaattagctgggcgtgctggcaggtgcctttagtcccagcttcttgggaggctgaaacaggagaatagcttgaacccttaacccaagaggcagaggttgcagtgaaccgagatcatgccactgcactccagcctggatgacagactgagactccgtctcaaaaacaaacaaacgaacaaaaatatattcattgttttcattgaatttgttttctttttatcatgtatcataagatttattgatttcatatcagcatttaaatgttgttaaacggatgtagtggcatttaggttaaggattagtgcactttcagttgtatgaaggatagctgtattatgttaggcataattatgaccttattattgtctttatttggagatcaagcatgattgcagctagatgtgtaggggtgctaagttgacaagaggtgggcttttgatggttaatactaggtgtcaacttgattggattaagggatgcctagatggctgggaaaatattgtttcttggtgtatctcttggggttttgccagaggaggttgatatttgagtcagtggactggaagagaaaacccaccctcaatgtggatgggcaccatccaatcagctgccagcacagctagaataaagcaggtggaagaagatgagatagcattggttgctgtgctttatgtttttgttttgttttccttgctggctgcctttttgtttcctcctgcccttggacatgagacttcaggctctttggtggttggatgccagggcttgaaggaggggcttcctgagggctcctgggccctttgtcagagactcaagggtgcactgttggcttttctagttttgagacttttggatttagactgagccactaccagtttgtctctttccgtgcttttagaaagcctatcatggaactttcatcttgcaattttgtgagaaaattctttctaataaaatatttatatatatacatatgtcatattagttctatttttctggagaaccctgagtaatacaactttgatacacaaaacaacattgttgtactcacaaaaatgtatgctaactaaaataagccaacaagtaaaagtgcataaagtataaatctatttctacaaaccacaaaaaatgaacatgaatctaaagtaacaaaaaagatcagtagttgcttagggacagagtggaaaattatattttttcaaatgctaaaaataacactctcatctactatgaacattgctctctcctcaggtatttcaccccagaactgactctacaacaggagacatgcaaacaggttcctgttcatgtactaacacttcctagcacttctttttcatgtacttctttgacttatttgttgatgaaagttgataccataaaaatatctaaacagggttcacattagagaaaaagaagagagtgacaggaagattaagccagagcatccagttccagtgattctttgatcctgccctccctgaaatctagaagcagagggatgagccatgctgagcagagcacacttgtccagggagaaagaggagaaagaggtgtaaatgtgtccttcccatgctccctgtccataaagggaacgtcaactgatgtctgtgcccttccttagtgtctacaacatagagtgtgtgctaatctgtgcttcactttttatcactctcagaggtagggcttctgtggatcaaatacagctgtggctgctcctcagcctgttccctctgtattcgtaatagtcctacatgaagttcattggtggaatctcagatacttttttacaaagcctctgaatttaccttcattgactccatcattagctcagcccagtagtcttcaggccaggggctggtgttggggggcaacagtgagtgatttgagtggaatttgttagtggtaccctccatcaatacaaagaagaatcataatcctcagggacacccttgtcagcacagtctccctcaaaatgaccaacctgagagccgagaacaaggtcacgtgttactgtgagagacacagtcagcagacaccagtgtggtgagtccagacgcaaacttccctgcagggaaacaggaggggactgcaaagtaggcatgctcagacccaccagtgggcgatggggacacacaggagtgctcagaatccagcagggggctctcagaacaaccaggaggcacttagaatgctgggggaagctcaggacaccaggggccacacagaaccaccggggggcactcacgacacaagggggttctcaggaaccaccaggagatgctcggaaccaccagggggcgctcattaaccactatgggacactcaggactaaccaggagacgttcaggaaccaccagagggcgctcagaaccgtcagaggacagtcagaaccaccagggggcgctcaggacaccaggggttgctcaggaccccaggggttgctcaggaccccagagggtgctcagcaacaaccaagtggtgctcagatccaccagggggcgctcaggaagtgagggggtgcccaggaaccaccaagggtcgcttaggaaccacatggggcactcagaaccaccagggggcgctcaggacaccctggggagctcagaaccaccagggggcaatgagaacaccagagggccttcaggaaaccagggttctcttagcaggcagctcctcatcaggtccctggggagggtgagtttctttatttaggtcttgtgattcctgacctggtgaagcaaacgtcttcccagggtcttttactatttcttctttagaatccatggtttctctcacctacaaaaccttaacttagaacaggagttcaattaaactattaattcttaatattgttgtaataatactagtaataatatctcagtacaattttaaaatgaagaaattgtgtatgcttacttcaaattatttccacaaacagcttttcgtttctgtgctgtgtcagtcacactatcataaagggtttctaacaataactcagcatatgcatggtgctgagtttctttctctttcatcctctgattgtgacccctcaggctgtttccccaccttccctttttctgtccaaacctttcatattcctcaatttccattcaaggaaccagcaagtccgtttacattgcctcatccgtgtctggtgaatcagttcactttccttcatgatcaccgaagccaatcaagtatgggcaggtaaatgttcttagaatatgttcattcagactcactgcccacctcacccctttctagggtcctgcagacatcacccacaccccatctcctcccttccctaattaacagagtgggctctgcagctcctgctgccctctgtgtgctcagccctggggctcactagggctttgatgatgaagtccacatctctaaagtatttgcgcactctcagaccaccctctagcaagctgctgttgtgaatgaatcctgagaatcctgggcagatttcagttccacattgctggatgttctctagcattcaggagtattagcaaataactaccagagtgaaattggatgcaaaaaaatttaaaggaatacttttaaatagaaatattttaatctgacttttatgaaaatacaatgataatacaatcaataatgtaataaaattttaatagtaatgtttattacttattcaatttgtgaatgactgatattcaaaaaggatgctgctaacacaaatgagaaataaaccaacacaaagttcataaataaataccattgtacattaaagtaatataattttcaagaatggcatttatgttaacttttaccagaacatgcattgaaatacatttgtttattgacattggaatagacagaaatatatatatagaagaacattattttagactacaatctcaattactataaacacaataatttcaattcaatccaataattaaaatattatgcaaaaagtgtgccttctttttgtgtttgaatatgcatttatttttggttttgcacatatgtgtatcattgttgagcatgtgtggtttttttggtgtgtgtgtgtgtgactatgaagtaggaaatacattattaacttatagggttataacaatctaagttttgccatgttaaaagataataaagaacacacaagtaaaaaatcatagtgtatttcaaatgcctcagacttccacagaagtcatatcaataatgaacatactagttcaaggttttgaaaaagacacatgtaataagatatgtcaaattgaattaatagaatattgctatgcagttgagaaaaacatcatacaatcagtctcactactggccaaataaatgcttatgataataatacctgtagtccatcctattgtagagaataaaataactatataaatgccacttccattactagaatttagtattagatacttctaatattttcctgatacaaataaacatttgtcaatgtcttagacatttcaaaattattttaaaaaataatttgcataatgtttgtgatagtatcattttcaacaacctattccataagttcttatggtttttatttttatcatagtgcttttgcagtttacacacttttgatttgtaataagtatagatgaccagaacaattttagaagaaatacatagtgtgttcccttccatctccaagtttcttctaaggttaacttttacataaacatggcacattctactaacacatttatacctatggatttatatttattagactccagacattatttgagcttcaacaatttcccaatatttttcttgtttgttttccttttttttttaaatatgaggtctgactccactcttgcttttgtttgtttctttgttccaaggctcaacctgggtcaccatattgaattcaatcactctttacctctaatctttttgggttaattggagtctgcattcctactgttttccagttgaacattttatacatgaaaattagccaagtaggtttttactgccatttaggtaacttaaatcttttcatattttttcactgtctgttctttcaatcacaattggtactgaattttacatttactataaatgttagtttattttctgaaacatttgttaaatcttttttgatgtcttctagaaaagtaaaccctttattctgtgtaatatttttcttcagtcttaacagtatattttctaatgaccacttattctgaaattaaaatagcttctcaataattcttttcattcatactttcatggaacatgtcatcacatcttcaactttctatttgtaaaaatacagagtaactttcttgtaaaaacctaaaagttgaatcttttttttaagaagctatgacaaattatccttttaaacttttatctctttttccggttaatttttttttttttgagatggaatctcgctatcattgcccaggctggagtgcaatggtgagatctcagcttactgcaacctctgcctcctgggctcaagcgattctcctgcctcagcctcccaagtagttgggattacaggcatgcaccaccatgcacagcaaattttgtatttttaatagaaacagggtttctccatgttggtcagtctggtctcgaactcctgacctcaggtgatccgcctgcctcggcctcccaaagtgctgggattacaggcgtgagccactgtgcccagcctgttaattcttgctttattttggcattttattgtaaagtttatcctattaacttacttatgacttaatttatttttattaatgttttgttggctaccacaaggtttgcaataataattttatatcatcagattctaactcagataatgatatttttgtaccagttgttcccttctacagcttcaatattctccactgttacaatcaatcaccttctagatctgctgccatgccctgcagattaaggattttattccatgacagagtggaggtgcaacttgatggaactttgatgagaacctcggtttttatcccatgtcctttagggctccatcagtacctctggaataatggtttcagtggcttgcccctgcagggtagataattccttatttctatagtgctaaggagggattgtgtctgaatgcattttagaagtatgtggcctccctctgtcttagaaagacactttgggaaataaagatttttctcactgtccccattctagggtaaagggattcactaggataggaatgctgatcaaagaaaaccttcaggcaaattaaatttaaaagagtttaattgagtaatggatgattcatgaatcaggcagcccccagaatagattcgaagaggcttgaatgtagccacatggtggaagaagatttatagatgaaaaaaaaatgatgtacagaaattagaagtgaggtacaggaatgactggattggttacaggttggtgtttgtcttatttaaacacagtctgaacactcaagggtgtatgagtggttaaggtatggctactggaattgaccaaggctcagctattgttacaggtgcatactcctaaattagggtttcaatcttgtccacacattcaggtaggttacggtttgtccacaaggactcaatcatagaagtacggagtccttctcaggccatatttaattcactttttcagtgcccttcagtatgtggttcctgagaatttcacacgacaacacgttttccacactggaatttaagcaatccaacacgtatttgtctttatcttgtaataggctatatttcatatggcagcctctgcctcagtttagttaacaccatggctttgtttctctcttggagaaacaagaacttgtttctcccaagatttccgtgttcgtgaaaggaaaatatacctttgggacccccaaatcactaagccaaatgtgaaagtgaagctgaaaactggggcaaacccacctcccattctttccctaaaatgatagctactaaggtttttaaaagctgcatacctccttcccgatttgaccacaaggaaaatccttatgaaccaaggacagacagaataatttctctgctcacgtaagtcaaatgcatatctgattgctacctttgctctattgtttcgctgcgtgaaaaataggcctacgtgactattcctgtaaattgtgcattcagttaatggctaatcagaaactcaaaagaatgcaaccatttgtctcatatctacctatgatcttgaagctctctccccacttcgagttgtcctgcctttctgaaccaaaccaatgtacatcttacatatattaattaatgtcccatgtctctctaaattgtataaaaccaagctgtgccccacaaccttgggcacatgtcgtcaggactccctgaggtggtgtcacaggcatgtccttaatcttggaaaatgaacttcctaaatctattgagattagtctcagatactctttggtttacaggtttattttttatcttataacttgtattatctgaaatattaaagaaaatttgccaaactacacattctcttgtttaatctgttattgtttttataaagggaaatatatttatataatttatgtataatttataatttatgtacattatgaagctgagtagcagaattattaataagatctagagtaataaaaaattccaggatcaattatcagcttaatagaaaaagaaattatgctacatttgtttgctgaaatgctacccatttataaaatataaacacacacaacaaaaaggtttaactctcagcatttctattgagaaaaataagccaaatagttaagatatatactatattacttcattcttataaattctagaaaataaaagctagttgaaagaaatatgaaaacatcagtagttttataaagaaatggtagaagaaaggaaggagaaaaaacaaaaaaaataagagagcaagaggaatcctgagggaagttgacttgtcaccttcttgaaaatagagattttttttcaatgtttactattgtacaggttaaatatgtgaattttgttatctgtcaattaaaacgtatgaaatttattacaagtaaacaattgacattttagacaaaataggaaatacagcaaggaacaaataaatatgttaaatgtcagatatacctaaatatttatctacctgaatcttgtctccacatttgtaagtaaacacagcaaaatcagacaggttctcgtgacaggaagtggattctgcaaaccacacttggcccgtttatctctgtcctgtagttggttcagagcaactgaggccagttgtgaggagcataggcccaggtactaggactcactcatgccagatataagcccttagacacatacatagcccctccatgtgtgggttcacttttacgtctgtacatgaagaaaccactgattcctaaataacataatttatacacataggtaaacataattaaaaatgtgatagttattaaatgtttatcatggaacaatttcacaataagtcagcattttcccaaatacaatcattgtcatcgaaatccccaaggacactctcatctgccctgggccctgccctctcctcaggcgtcccaccccagagcttgctatatagtaggagacatgcaaataggtccctccttctcctgatgaaaaccagcccagccctgactccgcagctctgggagaggagccccaggcccgggattcccaggtgtttccattcagtgatcagcactgaagacagaagactcatcatggagttctggctgagctgggttctccttgttgccattttaaaaggtaattcatggagaactagagatagtgtgagtggacgtgagtgagagaaacagtggatatgtgtggcagtttctgaccttggtgtctctttgtttgcagatgtccagtgtgaggtgcagctggtggagtctgggggaggcttggtccagcctggggggtccctgagactctcctgttcagcctctggattcaccttcagtagctatgctatgcactgggtccgccaggctccagggaagggactggaatatgtttcagctattagtagtaatgggggtagcacatactacgcagactccgtgaagggcagattcaccatctccagagacaattccaagaacacgctgtatcttcaaatgagcagtctgagagctgaggacacggctgtgtattactgtgtgaaagacacagtgaggggaagtcagtgtgagcccagacacaaacctccctgcaggaacgctggagaaaaacagctgcagtgggcgctcaggacccactgatcagcgtcaacctcagaggcaggtgcacaaggaggctgatttcctgtcacgatgtgggacttcatctctttacagtttctctagtgaacctctctaagttcagaactctgtgcttactaatgtcatctgtacatattttttaaaatgattattttaatatgaaaacctattctcctgtgtacaaaatgcggattgatccttacagaggagatgaaaactcctcaaccatggtcaccatgatcagagttctgaggaaactaggggcttcctggtgagtcttctccaatcaaattcaggacaggaacctcagaaagattcctgactagaactgaggtattgctcctcacaagagagctctagctccggggggtctgttcctgcagacccctgattcggtggtgtatgaataaaatgtacactgacacacagatactctgtttttccagtgcagctgagggtccgaggccacttacagactccaagaagaatcctgtaaagaatggcagcagtggccctgagcagctcgcactccaggcgtgtatttagtatagaattaacaacagaagctctgagtcaacacacttgtggataattaacatggttaagagagtagttctacgaatgagtaaagctcagggactgtggtctgaagtaaataccattagggggcaatattcttggtcgacctcccgctgagagggtcttctggcttaaaggttagttaatggggtagggtaaccagacttaactggggaagcctctgttgtccctagtatttaccctacaacctaatgctctaaggtaagaaccggccatcttcagcctgttcagttattgcaagctatgtaaacttccggccttccaaaaaagtttgtgactatttcctataactttcgttaatatttccctttaatatttctgccaccatcctgaatgaatcccagcaagaacagtctttggggattctgattacagaaaaaagagaggctgggccagggtcagtgtcatgtagaacctcacagctttcttgtgggacccttctcctgacaccgaagtatgcaaatcagcatcagcactgatctggtgcttcttttgttcctgattcatttactttcttttttagttgttgttctcatttttccatttgcttttcctgctttctgagaaacaaagatgtttttgctgtggtcaaaattccaggcctcaagcccttttcctggagctcaggtgggtctcaggctgtggctgctgcagtcacgtgggagaggctggtgggactttcttcactcctcgtcactcaggaccctccactgtgttgcatggagactcatgtcgaaatacaagttgccagtgagaacacaggggacaagcttgtttggttaacgtgggatgtggatgtgtttctaatcctgttctgaaaaaccttcacacagtaacgttcttcactagtggaggaggaagtgggtgtgaacgttgtcagaataaaaatggagccacgtgtgttataatctttacaggtgaagctggaggaggtcatgaatagagggttctcatgcacacatccctgataacaagaactaccctaaaaatactctgcacaaccacaaccttgaacaaaggctaccacaacaataagagaattaatactgtggggatatctgccctgcaactccctgttcagccttaaactgattctacccttgttattgattcttctaccccaggataattgtctcaaaatagctcatgtaatcttctcatttatcctttagaatacttgtcttcctttaccaacctaaatgtgaccatggataatcccattgcaatgctcattttcaaataaatacgatttgattttggagaatctctttctgtctgatatttaggtttgacaagatgcagaccactttcctgtgagatgtagggaatgacaatttttgggggtggctggaaacatccaatactctcagggccggccatcagtaaatgcaggctggatgtcttagaaagagctcaaggtccttaatcaccatggagttttaccttctccagatctgttctgatggaatcaaggccaagctggttatcaaagataatctacctatcatagagtcaactgattacagttttaataaagtctattaaaaatccacactaccacctggattagtgtttggtcaaataactacaaagtattggccagccaagtacaccataagacagaccattacccatgtagaaaaacatttaacatgagttctaggttcttatattgttaaaggtgtaaaaccgattatttttaaattacgctatttttattttatcgagttgtagaagtttcatttacgttttggatgttaacacttctttagatacatggtatattatccaattctgtgagttggaattatttcgttgctttgcagaatccttttttaaatctagtcccacttgtccaattctgtttttttttttatgtcctttgaatgtaaaagccagaaaaagattgctaattttttgagggttgggagttttacaattgcaggtatttcatttaaatattgaattcatttagagttaattttttttgtttattctaacctaaaattcttaattctttgcatgtgaaaatccaattttcataacctgctctttggaagtcactataatttagcaattgtatatcgattgttctcatgctgaaaatcagctggccatcagtatgtgggtttatatctcagccctgtatgcatttatgccaataccattctgatttattactctgtgtttctaataaatgttgaggcctggaagtgaaatacctcaagctttcttcttgccttgtttcagatattagaccaaaatattctaaccttttactattgagtataacaatagctgagacttttcttaatggcttttattatgtacaagttgtttgcttgtcttcatactttgttcagagtttttataatgaaactctgaattttttttcaaatgtttttgtgtctgatgaaatgttactgagatattttttctttagttttttaatgtggtgtaccaaattgattgatttgagaatgttgaatcatctgtgcatctcaggaagaaatttgagttggtcatggtgtatggtcttctataaaatctttagaatttattttactgttgttggacggttaatttatgtctattaatgatattgatctatggttttatttaattgtggttcctttgtctattactggtaatactgtaacggtagcctcatagaaagagtttggagggtttgttgcagactgcctttaaaatagattttatcagtggagaaacggtgatagtttttttcttcagttttctgttgggaatagttttatgtattttaaaagatattttgaatgacttaacctgcttaaagggcttacataatattcctttcttccatgctttttaaagaactgcttacctttcctaattatttttagggtgatttttttcataaagattgtgcaatacattttgaggtgaaacttagtggattttttctaatgaattagaaataataaatcacttaattgactattgtattaaggttgatttgttgaatatttgctaaaggccagttctttaagctgtgccatgtactaaatccctaaccgactattttattcaggttgatttgttgaatatttgctgcagaccagttatttacgctatggcatgtaatacatcccaaatggcagtaagtcattgtttatttagcttttgtgcttatatttttcagaggaaaaaacactactgtaaattgtaaatagccaatacataacagtattgtatgcaaatctgtgactgttggcagtgtcatctctgagaaacagataaagtttatttactatatataaaaaaaagagtttggaaggtggactcctcaccaatttttgaaagagttacggaagggttgccattacttctttaaatgttaagactcattttatgatttaacatataacctatcacggagaatgttcaatgggtgcttgagaaggatgtgtattacatggctcttggttggaaggttctgtaaatgtctttcaggaaaatttgttcaacagtgttgttcaagttcagaggcttgttaacaattctctttctgaatttgctatacattattgttaagtgaggtattaaggttttcccatatttttatattgttttctatttctctatatatgcatatatatattaaagtttgcttaatgcatttatatttgtatttgtacacatgtgtaaaaaataaaatagtaattgcctagtgagtttcatggcacagtcacattatgaataatcatattttcccaaacgctgccattccactaactcctccagatacatggtatattatccaattctgtgagctggaattatttcgttgctttgcagaatctttttttgttaatctagttccacttgttcaattctgctcctccaggagtctcatatctcctctgggcactgccttcttctcaggcatcccacactggagcttactatagacgaggaggcatgaaaacaggacactccctctcctggtgaaaacaatcccagacccaaccctgcagctctgggagaagagccacagccctgggattcccaggggtttccattttggtgatcaggattgaacacagaggactcactatggggtgtgagttaagctgattttttcttgtttgtatttaaaaaggtgactcatagacaactagagtgagtggatatgagtcagagaaacagtggatatgttcggcagtttctgaccaggatgtccatgcattttcaggtgttcagtgtgaggtgcagctgattgagtccatagaggacctgagacaatctgggaagttcctgagactctcctgtttagcctctggattcaccttcagtagctactgaatgagctgggtcaacaagactccagggaaggggctggagtgagtaatagatataaaatatgatggaagtcagatataacatgcagactctgtgaagcgcagattcaccatctccaaagacaatgctaagaactcgctgtatctgcaaatgaactgtctgagaacctgaggacatggccatgcatggctgtacataaggttccaagtgaggaaacataggtgtgagtccagacacaaaatttcctgtgtctggaaattttgaaagaagaaagaagaaaggagtctgggccgaaggggacactcagcactcacaaaacgggtggaggcctagggcaggtacagaaaagcagtcaagggctgctgtccttcaggatctgtgccttcctctgcatatagcaggtgccctcgaatcctctgcacttttatgtttctgtgcctaccatgaggtccctggattacaaaactttaatttgaaagaggaaacattcttatatgtcccaaaaaccgatgtaagtattggaggtgtaaaaatgcacaggcagttggatgaggctgtagacactgccaacccacaatgccagtctcacaactagcactggagaatagtgggagttcaatggagcttcctacctatcttgtggtccaagctaactccagcgaggccattggtgccatcagggacctcccatatgtcccagcagcagccatgcctcagtatctctattgtgcacagccatagtctgggaggagctcccaggatgggtgtctttggcacacacaggtgatgggtgttagagtgtagtgcagcagctggctgcctggtctattgggctccctgatgttggagggattagaggtggattctcagggccagcacactggatttttgtatgaaaaccatgattttacttcattttctcagatgacatagataattaataacacaatctgcaaacaattgtaattttcagctttagcccaaattcattgtttctgaattctgtgcaggatccagacatggtactgcccttctcatgagaaattgttcgacctaaactgaaaccagttgtttctcgtatactttggttctccccatgtgcagagatcttgattagagcaagtttggtactttccacgcactcaccctcacctccccagataaagagcagaagttctccttagactgagtctgagggaggagctgttcctgtaccactcagggcctgcggagacccccaggtgcagcttcactgagtcaggtgtttcactccctgtgattgctgctcaggtctaattgtggctcggaattaggacagtcttcaggttatcacaggtcaatcatattctaaaaatcatcgttatcacacaccatggtaacaattcaaggttcatttttctaacggcagtttctcttttttatttggttacaagtttgaggaaaggaacatctgataatactttttaacctaacctcgaaatctactgaattgttctaggagactcacaaattggacaaagtgagctctttattctcataaaaatgtgtggttttgggaatttcactgtgttgcccagaacctgttaacatcaacaactatgtttctcagcacacttctggcttgagacgtccttgcagaccctctccctcacttgcactgtctctggattccccatcataaccagtgcttcctgctaaattatatctgcttgcccctagatggacaggagtggatcaggtgcatgggttgtgaagggaggacaaattacaaccacttctcaagagtccatatccagatccaagaaacagttcttacagctgagctctgtgcccagtgaacacacaactacgcatttttaagcaaaagacacaatgaggggacttcattatgagcctagacacaaatctccctgcaggggtgcataggaccagcagggggcactcggggcagcatggggacttaggataattgtcggggatcaggatgagcaggatcaaggctcagcattgggacaggtgcaagagggcagaaaaggggctgtagatgtgggttgttttcgtcatcatatttcaccaacagacaccctccactacatctcttctaatgtatctgagtgtttatatgattataaaatggcatttatgtaaatactaatatatacccatatgaaggtgcattgagtggtcctcgccatctcatgtggcccttgtccatcaagcaataagtccctgtattcacttgagtacctcaaacattacagtccaaacatgtaaggtttccctttttcttggtctctcctcctcccttctctctctgtcacacaaacacacatgaactgacacacacacagagcttcccaactttaattatctgatgtattgaagcaaactgattaatatgcagcttttctgctttgcctcccatttatgttgtggtgaaaataagaaccatgtgtttctcagctgggcacttctctaagttaagtagcagctttgtttattacaaccagagagcaaaagtaatccaggtgttagtcagcagcttaagaggtcaacaagttgtggaaaattcatttactggaataatacccactgttacaatcaagtactgttggatacactcaacaccatgcttaaaataacaagtacctgaataagtaaaataagtcaaacaaataaaagtgcatacatacaattccacttctataatttctctgaagtaaaaatgaacttaaataaaaaggtctgtagttgactgtggatgtggtacaagaagagaaggtgtggaaaagagaaactacagaagagcaaaaggaaatttctagggtaactgatttttttctgtgttagtaaaagtgaggattatgtcaatatttgtaaaattgtccactttacgtaaagattattatttgctaatttcacctcattaaaacattgcaaattttaaaatgtataatttgttagaaaaggtgctagagagagattaataaaatacgtaaaagtcagagactcctgaatacacacatgaatgaaccctgggtctcgctctacttttagggagacactagaatacaaaaacataatgacaggattacagttcatgaaaggagcttctcaaaccccaggaggcatgtccaactgcgtcctggagttaactcagggagcaggcatgtcctttggaaggagccatgacaccaagctcccagcatccattgtagctgacaccatgcaaatgccaagagatctcaactaaaattttctgtggatgttgagtctgattatgccacacactcacaccaagtgagtatggtaaggatagttacctgcatccttaaggtgtctgctgagagcagggcaggtctctcattaaggtccaaagtggcttgataaagcagggaaggagactggctcagggttgttatcatgattttgtggtgtgggcatcctactggcaggaagggttttgtggggtttcaaggtcaatttggcatcaaataagggagctcctgtgatttctaactagatttatcctgtgtgctttaaaagaaagagagatgatggaggaaagagccttatgctattagcaatcaggcataaaaatagaacctgatgacttactctaaatagcaagtataaaaataatgaggaagaaaagagacaagattccaatatgggtggacaacaaccaggtctgcagaaaatgagaagactgtttataagcaaagaataatgagtagaaggaggatatgagaaggattctggtccaatatcttgtgtggaagcttttcatgattcgagatcatcagcttattctgaaggtcttaggtcacctgtcttcttcaaaatatcagaagttccagaggatatgtgaggatgcacagtttaacttcctctatttgagtagctttacaattgtgtaaaattcttaattcttttttttaagatgagttctcactctgtagcacaggttggactgcagtggtgtgatcatagctctctgattttaaattcctggctcatagaatccttccacctcagcctcctgagtagcaagtagctaggtctagagggcccttcatctacacctggctgattcctttttattcattttttcatagaaacagggtctctctatgttgcccaacctgcttttgaacacctggtctcatgcaattctccaggcttggcccatcaaagtgttgggattacaagtgtaagccacctcatccagtagtctgcactgatttttttgttataaagtatgaatccaataattgattccctggattttttctgcagtgctgtggttaaaagtaccttataagattccttccaatgtggctgaagagcagtgtttttccctaatgtttcttccaatagaaatgattttctggttgaagttcacaagaaactgttaaaaagatacagtaaaaaggcagccgtaaactgttggtgattcgagtgtatataatacaggaatcactttctatattttgtaacacatgcatgcagcaggaaaaaggtgagtgatgagagtcaaatctctgaatgtatgggcctcccagatacaattcataggctaataactgacgtgccccaaggagtgaaatgtgatgccacacatgctagcaggagaacacgtggccaaggaagttttttataatttctatttaaaaatgtctatttccattttttattttttttatattttcctactttattcaaaggaaagatctaaaattgacaccctaacatcacaattaaaagaactaaaaaagcaagtgcaaacacattcaaaagctagcagaaggcaagaaataactaagatcagagcagaactgaaggagatagagacacaaaaaatccttcaaaaaatcaatgagtccaggagctgtttttttgaaaagatcaacaaacttgatagaccactagcaagactaacgaagaaaagagagaagaatcaaatagacataataaaaaatgataaaggggatatcaccaccgatcccacagaaatacaaactaccatcagagaatactataaacacctctatgcaaataaactacaaaatctagaagaaatggataaattcctggacacatacaccctcccaagactaaaccaggaagaatttgaatctctgcatagaccaataataggctttgaaattgaggcaataattagtaactaaccaaccaaaaaaagtccaggacaagacggattcacagccgaattctaccagaggtacaaggaggagctggtaccattccttctgaaactattccaatcaatagaaaaagagggaatcctccctaactcattttatgaggccagcatcatcgtgataccgaagcctggcagagacaaaacaaaaaaagagaattttagaccaatatccctgatgaacatcaatgcaaaaatcctcaataaaatactggcaaactgaatccagcagcacatcaaaaagcttatccaccatgatcaagtgggcttcatccctggaatgcaaggctggttcaacatacgcaaaccaataaacgtaatccagcatataaacagaaccaacgacaaaaaccacatgattatctcaatagatgtagaaaaggcctttgacaaaattcaacaacacttcatgctaaaaactctcaataaattaggtattgatgggatgtacctaaagataataagagctatttatgacaaacccacagccaatataatactgaatgggcaaaaactggaagaattctctttgaaaactggcacaagacagggatgccctctctcaccactcctattcaacatagcattggaagttctgtccagggcaatcaggcaagagaaagaaataaagggtattcaattaggaaaagaggaagtcaaattgtccctgtttgcagatgacatgattgtatatatagaaaaccccatagtctcagcccaaaatctccttaagctgataagcaacttcagctgaataactttgtatgactaataatataaaatgttccacatatttttagccatgttttacttatttgtgaaatgtgtgtttattaatttttcattttaagatgtcacttttatctttcttgtttctgggattttattctagtagatatagctgaaggtattttaataattattgtaataatctcacattttatatttgaattttcatatccatttcattaagattttgattttgatataaaatattttcttacaattgtcttttctatttttatgagataaaattaatgtatacaaaattgcatacatcttcaatgtacagtttcaggtgtctgacatatgtgcacacatttgtctccagcacctaagttaggatgaggagcaggtcaatctccacaacaagtgtcctctttggtgcttccagtcagctctcacataaggatttttatttaatttcaagttttcattcagatacagagggcatatgtgtggacttgtcacatgggattattgagtgatgctgaggtttggaatccagattccatcaccccctccctccactctccagcagtccacagtgtctatcattcgcacatttatgtccatgaatgctcaatgctgaggtcccacttagattatgtggtattcggttttctactcctgcattgatttatttaggtttcaggcccccagctccaatcattttgctggaaaggacatgactatattatttttcatggctgtgtagtgttatatattgtagatgtaacacattttgtatattcagtctaccattggtgtgtatctgggttgtctttgccactatggatagcacagcaatgaacatagatgtgcatgtgtctttttggtagaattgtttgcttactttttagtgtacacccagtagtgggattgctgggtaaaatgatatctctgttttaagttctttgagaaatctccagtctggttctcaaagtggtaagactaattcatattccaatcaacagtgtataagtgttctgttttctccacagccccaccagcatccatcgtttttcgactttttagtgatagccattctgagtggtgtgtggcttctcacctacagtcatctcatctttgataagactgacaaaaacaagcaatgaggaagggactccctgttcaataaatggtgctggggcaactggctatccgtatgatgaagattgaagctggacgtctactttcaacacacataaaattaactcaaaattgaccacaattttaaatgtaagaccacaaaccataaaaatcttttaagacaacctaggaaatactcttcttgacaccagctttgacaaagaatttttggctaagtatccaaaagcaatttcaagaaaaacaaaaataggcaagtgggacctaattaattaaggagttactgcacagcaaaacaaacacacaagcaaccaaaacttcagcagataagcagacaacctgcaaaatgtgagaagatattcacaaacattgcatccaacatagcactaatatccagaatctatagggaacttaaacaaatcagaggcaaaacacaaataacccctttaaaaatgggctgatatggtttggctgtgtccccaccaaaatctcaatttgcattttatatcccagaattcctacatgttgtaggaaggatctagggggaagtaattgaatcatgggggccagtctttctcatgcaattctcgtgatagtgaataactctcatgagatctgatgggtttatcagatgttcccgcttttgcttcttcctcatttcctcttgccaccaccatgtaaagagtgcctttcacctcccaccatgattctgaggtcctcccagccatgcagaactgtaattccaatgaaacctgtttttgttcccagatttcagtatgtccttactagcagtttgaaaacagactgatacctgggaaaataacacaaacagacacttctcaaaagaatatatacaagtggccagcaaatgtattttaaaaatatttagcatcactaatcatcagaggaatgcaaatagaaaaatgttctggtttctgtcactataggtccattttttcctgttttgagcatcacataaatggaatcaatattatagttcattttttgtaaggggctacttttggtatttgtgaggttcattcatgtatttgcatctatctaggttttgtcatcatatatatacatatgtatgtactcatgcacatctagctatttcatatctcaatcagtccattacgttaataaacgacagtttattaagtaaggaaatcagttcattaagtgaataagtgtcagtacatatatctattttcctgttgatggaatttaaatttgtttccaaaataaatattgtaaacaaacctgttataaatatcgtcgtacaagttcttttgcttatattctcccatttttattgataaaatatgtagaaatataagtatgcattataacttttcagctttaaggagctataactgacaaacaaaattgtatgtatttaaggtacaccacttaaggtattgatatacttgggcacatgttcatcgtgatcaaggtaattggcatgcctatcatctcagagaatatcattttatgcctttaatttattgtgagtctgtgataaaaacacctaagatctactcttctggaaacagataagtttataatataatattcattagtatagttgcattgctgtatgtttcatctccagaactccttcaacctgtgtatcagtccattctcaaactactttagagaactacctgagactgggaaatacatgaagagaagtgaattagatgactcacagttctgcaggcttagcaggaagccttatagggaggcatcaggaaaattacgataattgtggaaagtgaaggggaagcaaggaccgtcttcacatgctggcaggggaaagagagaaagagcaaggggagatgcgccgcacttttaaacctcgagatcttgtgagaactctaacacaagaagagcaaaggggaaagccgcctccatgattcagtcactcttcatcagacccctcctacaacacttgaggatgaaaatttgacatgagatttggatggaaacgctgagccaaacagtatcattatacccggccactcacaaatctcatatccctctcacattgcaaaatataattatcccttctcaacagtctcccagttttcactcaattcagcattaacacaaacttctacagtccaaagtctcctctgagacaaggtaagtttcttggatgtataaccctgtaaaataaaaaacaagttagttacttccaagatactatgagatgaatgcactgggtaaatgttcccattctaaatgggagaaattggccactacaaatgggctacaggccccatgcaagtccaaacactagcagggcagtcattaaatcttaaagctccaaaaaaatttccttttactccatgtctcacatccaggacacgctgatgtaagaggtgatctcccaaggccttgggaagctccacccttgtggctctgcatgttagactccccatagctgctttcataggctggcattgagttgctatgtcttttccaggcacaccatacaagctgctggtggttctaccattctggggtctgaaggacagtggtcctcttctcacagatccactagacagtgcccaagtggggactctgtgtgggggatccaacaccatattttccttctacactggcctagtagaggtactccattagagctcagcccctgcatgagacttctgcctggatatccaggcattatcatacatcatctgaaatctaggaggaggttcccaaacctcaactcttgcctcatgtgcaccagcaggctcaacaccacgtggaagcaaccaaagcttagggcttgcaccctctggagcaatggcctgagctggaccttgaccccttttagccatggctggcacaggacagacagggatgcaaggcgccatgtcccaaggctgcacagagcagtggcatcctgggcttggacaatgaaaccatttttctcccctgggcttctggacctgtgatgggaggggctgccataaagatctctgaaatgccctggggacattttttcccactggggtccttgttacttatgcaaatttctgcagccagcttgaatttctccccagaaaatgagtttttcttgtctaccacttggacaggctgcaatattttatcaaacttttatgctctgcttcccttttaaacataagttccaatttcagaccatctctttatgaatgcacatggcttctgttttcagaaacagccaggtcaactcttcaatgctttggtgcttagaaatttcttctgccagatataccttaaattatgtctctgtagctcaacatttcaccgatctctagggcagggggaaaatgccactagtctttttgctaaatcatagcaagtgtgaccgtcactccagttcacaataagttcttcaccttcatctgacaccacctcagactggacttcattgcccatatcactatcagcattttgataaaacccattcaacgagcctctaggcagtttcaaacttttccacatcttcctgtcttcttgtgagcactccaagcttttccaacctctgcccattacccagttacaaagtcacttccacattttcaagtatcttaatagcagtatcccactcctggtgcaagttttctgtattagtccattttcacattgctataaagactacctcagactgggtaatttatgaagagaagagttttagttaactctcagttctgcaggctaaatgggaagcattattgggaggcatcaggacgaacaatgatggtggaaggtgaacgggaagcaagaaccttcttcacatggtggcaggagagagagagcaagtgagcggggaggtgccacacttttaaaccatcggatctcttgagaactttatcacgagaacagcgaagaggaagacaatcccatgacctgatcactttatcttaggcccttccttcaacatgcagggtctacaatctggcatgagatttgagtcggaacacggagccaaaccacattaaccttcataacgggaagtttttaccctttgaccaacaatacccaattttttcctcctcccagcccctgcgacctactattctactctgcttccaagagcttgaatataaaatattcaatatataattctatatataaatgagatcatgcagcttttgtctttctgtgtctggcttattccacttagcataatgttctctatttgttgcaaatataagaatttctttgtttttaaaggctgaataatactcagttttatgtaggtataagccacattttatctgttcattcgtagatggacattgactcgttttccttatctagactattatgaataatctcacaatggacatagatttgtcacactcagtttattttctctagatgtatgctcagaagtggggatgctctatgtccagttcactgagtaatcttcatgttgtttttcatactggctgtaataattcacattttgttccaaaccatacatggatacctttgtaccacatattcaggtctttgtgtaactcttgaatccatttttagctgatttctgtgtattgtgtgaggtgagttctatctatttcttctgcatatggatacccgtttttcacaccactcgttgaagagactgtcctttctctactgtgtgtcttgggaacttgacaaagatcagtttattgggaagaaatgggttggttgccaggttgtgtttaatgtttcattggattatatgtctgtttaaatgccagcattataacattttgatttatatagattcgattttgaaattatagattatgatatattcagctttgttatttatgcccaaaattaatttggctatttgaagtcttttatatttttatataaattggagctttttaaaaacattttgtaaaatcatgccatggagattatttatttattttattggcatatagtagatatacctattttatgggaacatgtaatatattgatacatttataaatgtgtaaagattagtgtaagatttacatatctgtcacattaaaaatgtaccctttccttgtgctgagcacatttgaatgactcctttcactattttaatgttgtgcattagattattattaactatagtgaccttactgatctatcaaacatttaggtcttatttctcctctataaatgtatatttgtatacagtaatcaacctctccttatctccttctctcttctatccatccaggattctggtaagcaacagtctattctatcttcaggcgatccagtattttagttttgacgtaaaataagaagatgcaatatttgtctctcttttcttggcttatttatcttaacataatgacttccagttccattcatattatagcaaatgacagaatattgggtttcatggctgaataatatcctatcgcatacatagattacatttactctatccatttgtccacctacagacactgaggtgctttcacatctgggctattgtgaaagagctgcaaagaacatgggagtgcacatgccttcatgaggtggtggtggttttatcttctttagaacatacccagaagaggatttgccaagtcataaggtatttctgtttttaatttattttggaatcttcatactactttgcacatagtggaaacacaaatggagtaaacattaaaaaagcagtttcggttttgatgtataatccagaaacaaataatgtttgaccatgattctcattgggagtctctaatggatctggtggaaatgcaggaagttttctaaccttgttcaggaaattatgagtttgcacctttttctttctgaggcttgaaattggcatgattcatgatgcatactgttgggaggtttcagaatgatatggcaaaaaacataatgaaaaggcaagacagagagagagggagagagagagagtcaggcctagaaagagaaaaaataattttctcaacaggagaaagtgctggatatctgtatcagtgttgggttttgctcatagacacatctgtaccgagtgaggaaccatgaagtcaagggaggggtctagaacttgttcaagtgaagcatcagcatatttctcacaggcaccaatttccaccacatcacaagggtgatgcatttttgaatgccattaaatatgagttcacagtcagtaatcatgtttccatgaaattcagttaaaataccaagggtgtgtccagatcactcatgcacaaatacacaaaatttgctttttcacgtgtggctatctagagacaaagtgcactgaggagacttcagcaggttacagagatttgcttaagtttggaaaaccataggagagtgcctttaagtgaaggttggtatataaattaaataggtcaaaatcccctctatggagtagcgttccaattgtgtggaatttttaactccttattcacgttataaaacataatccctgggactgactccgtggagttttactgctgtgttgacaaaaatatctaacaagcttccttccagtgtttcaagggaagtttttctctaaattttttccaatgtataaattttcctggctaaagatagtaaaaggctgttaaaaacacaactggaatggcagctttaatcttttgctgataggagtgagcataatacatgaatctctttgagtgctctgcttcatccaaatacaataggtcaaaggctagtactggaggtaaaatttccaagtgtgtatttttccagctaccaagtcataggaaaataacagatacatccttgagacagaggaccataatgccacaatgctggtaggagtacatgtagacaagggagttcaagggtttcttaaaactgataattttaatgtaagaataccattcttttaaacttatgtggaagactgtgggaggttataacaatgccatattttagtatcagccctgcctcacagaatcattttataatagttcctttcatgagtgtgcttcactcggttcatgcaaaaacctggcaggtcacaggctaaaaacagaaaatatagaagcttttaatcaactgaaagagctgtagcctttgtcaaggaattattggaagacacagagaacacagatagatgataaataaaatacattcatatcccattaagtgtggaaattgaggaaagtttacataaatgtgtccaagtggcaaactgtttatttaatctggtaaccaatttttctataaattgtagagttgaaatgcaacaaatacatatttgaaatgatctggcacaaattaagcaaatatggtaactatgtattttcactcatttttatttaagatcagcggctcagcattgatatttttgataatatctgtgactcagcagctttaccttttgaggatatgatctggtatggcagttttcttagcttcaatgttacctctttttgcattgacttctacctttatatctgccaggaatctggggaaaaggagtgcctgtaaacgttccctaacttgcccattttggtgggttttccagaatgtgtgagatgcttttttttttttttcaaagcatcccgaacccatgcactgccctgaaacatgtttatttcctagtttaacaaattggcacttctaataaatgcaatctcttctgccatctgtgctgattttacatcagatagaggactgtgttctaaaggaaatcttatattagtaagagcaattttgtcattaacctagagttttattattgaggtgtgattcataacatataatattaggtagaggttctcagtggcagtgtctaaatctcttgggtgtacagtgtcttccccgttaacatgaagcatttacgagcacagtcatagtttccagccatgcttctccctgtctcacaatcaccacaaactaactatgaccacaactggaacttggtgagttattctttaataagttttaagtttgtctttaatctttaagcctctagattattatgtgagacataatctttatgcctctagattattgtgtaaagctatttcagaagaaagttaaaaagaacattttaactgactaaacaacacaggaaatcattaataaaatgcaaagtgtagatgtgagaggctccaggcctggataatgcaagagttcatgtatgcaggcagtttctttccccaattatacaatgatacacccagcatgtcagcttcatgccccatttgactcctattatgcaagcgcatggaaatgacatgctcaagggtcacacacagatatgaaaacaggtgggagcaggagaggagacgactctgcacttctcctctgaaggaccaggaaagcctggacagaccatctccccggcctccatgactgcgcgacgtgcccacatggacactcatctctgacaagataagaggactccattgatgaggctgaacattttatgatttaaattactagagacttacattgaggtttcaataactaatttttataacccaaatttacttacccccatgttgttacctctttcttcagtgaaaaattgcttttgctgtaattgagttttaggaagattcccaatgttcacaactgagcttccaagagagtgtcgagaacaaaaactgaatgagggcagagaaacccatctttactgtgttcaccactaaactcaagtggactcggcactgcctttgatcactgttgcttctccgcagagttcaggtttctatttctcacaattctaacacagactctccctctcctcaaaggtttggcctccactggctgtaaggtcacactgttctgaatttcttgtctgaaccattttatgagggtggtgatgagccatttaatggaaattttatatcatctcagcatgaatcctatgggcggtcacgaattattattctgattatggtaattgatttttctcagcatattcattactagtgatattcaaaaaccctttttatttaaatctttgatgcttcattttttgttgctatgacactttttcttctactgagtcttcccactagcattataacatgacctaatatccaggctcagttgttatataacaaccacatatgtcaaaagctatgcattcttttcacagcagacataattttctcttttctggagatgaacacacactgctgagctacccccactcacaagaacatatggaaaatcatgacatttttatttacttgactaataaattatgtcattctctcttcaaattctttatcccccagaatgccatgacaaactcttctgcatctgttcaaaccataaactcagaaaccacatggtgagtaaaagctcacttggttctggatattgggtcaagctcttcccctccaatgtcccacagcattgggacctcagcccacctgtccaggttctatcaagagagtttagctccttcacagtgaaggaaacaattgagttaagagggaacctgcagaagatagacaatattgaaaaccattcatatgacaagggattactatcaagcatataaaataaactcaacccaactgcaaataataatgtggctaataatggaggaataacattaatacatatttctcaaaagaagaaaagaaaaagggcagatagatgatagatagataaatagatatattggtatgtatacatacatatatcgctagaaaacactaatattcaggaaaatgcacattcacaatgagatgtcttttcatccttcatctttgcttgagagtcagaaaatctaaataaataaataaataaataaaacaggagctggccaggattcatagaaagggaaactcttatagaccattggtggaaatggaaattagtgaagccatcatgggaaaaaatagaactaccatataattcacaatccaactgctgagtatgtatctatttaaatcattaaagtaaaaaactaatattgaagagatacatgtacacccatgtttattgcagcactatccaccatagctaacatatgaaatcaacatatgtgtccatcaacagatgaatggataaataaaatgtgttatatttacacaatggaatattgttcagtcttaaaaatgaaattctgctgttagaagcaacatggatggaactggacaccatcatgttgagtgaaacaagacagacacagaaaaataaatacagcattttctcagtgttatgtggaaattttaaaaagttgatcttctagaagtaaataatagagtagtggttatgagacgccgggaatgggaggagactgagagacaataagaggtttgttaacaaacgtataatttacaggcagataggagggatgtgctccagtgatctacagtgcagtagggtgactgctgttaacaatatagtgcacattttatgtttacaagtagccagaagacagaaatttgtatgttaccaacaaaaagaaatgttagtgtctaagctgatgaatttgttcattgttctgatttaatcataccacatggcacacatgcatagaaatatcacactgtaccccatacagttattatgtgctaactttaaaaaatcctttaattaaaacagattttatttgcatacattacaaatgcttcaacacagagccaggaataaataccatttttctttgaaatgtgaatttcctaacaacgtagttacattcatttgaaccaaaccgtgtatttgatcatggtaagaatagacaggcttatgcatagaatgatatattttaattttagacttctacttaataccataaattcaaataattttaaaacaactaagtaaaaactataaagttgaggaaatgtgtacgtggtgtgtgatgtgtgactttttccttgcgcaccactctgtccatggtggatgtgtggtgtgggtgtctgtgtctatttctgtttactctgcttgaggttctctgtgattctaggatctgtagttcagtgtctttcacaaaactgggaacgttcttagccattatttctttcaaatactgtctctgtatctacaatttctcctttcagatttaaaatgtacatatacaatactttttaatattaatgtttactttcttcactctcttttccttgcactttactctgtaaaatttctagtggtattttaagtgagtggtttcatttaaaaggtgagccagctctactgaagggtgtgcccaaagcttactcaatgtttatactgcattgcttttgatttcttatgcatttccatttgattttttcttagtattttcaactctcagttccctatctagtccttcattatgtatacagtttccttaatagatttttacatatgaattatagttactttatatatcttgtttaattagatagttctaagatccatatcatatagaagtctcattctgatcatttgtttattatgactttggtatttctcattaatatatgtaatctttgttgatagccagatattttaggttggacagttgatattggcttattacttcattttatgcattttctgcctgtatttgaccatactttatttttgccaggcctttaatgtggaaatgtttgaatcttctcagagctacatttgacgtttacttttgcagtagacgtcatagttgaagtctgttcttctgtgtccaccagagacttcagatcctccagtgataccttgtttttctttcctgcttggctttgtctcttcaccctgttccttcctccagagaatctctttcagctccttcaggtgggttaagatattatattgaactgacaattgtgaaattggtggaaggcaatagaataaagggagattttctgacctttcatgggtctatatttctacgaaggcattgtgaccctgagtctgggtgtgacattgccggtgtttctgaacttctgccagatgagatgttggtctgtgtgttcttgctgttttccctgctgtggagtcctcttgttttccccagttgttccctcccacagctccaatgttctcttttggtgttatcagcttccagagttgatgacctgacctagagattaaggctctgattaaataagaaggaggggagatacttctcaatggaacttaggtgaagacctctttttccatctcagttcctaagggatggccccagtgcccctaagatcctggctttggtggcttgctcctgcagagtaatttcttagttctgcaatggggattaaggaggtgggtctgaatgcatttcagagtgtgggctctttttctctcccagacagacacattgggacaaaagatttttgtgactgtccccatttttgggaaaaaggtttcaaggtataggaaagctcttcagtatgtggtccctgagaaattcacgctacaacacatttaccacacttgacttcaccaattcagtatctatgtatttttttctcttataatagcctacatttttatatgccagactctgcctcagttcaactcgtacccatgcctttttactctctgcaagaacttgtctctccctaaatttcggatttgatgattatcttaaaacctccagtatttaaagtatattttaaaattggcaaaattccatctcctgtgtttatctgttatgttgatgctgtaaaacagtaagtaaaatatactcctcatctatgtacattttgaagctgagttgcaggttttttggtaagacccagagtcacagagaattcaaatattgttaagctgcttaatagaaaaacaaattatggtaaatgtgttcactggaatactacccatgatttataataaataaatgcctgacacacagaacagcagcaaaaccacacatgctcttattacagaaagtggcttctgaaaaccacaccgggcatgtacagctttgtcctggagttggtttagggggatgtcagagccagtgacgagaagcacagggccagatggcagcgttcactcatcccagacatgagctcctgggtgcatacagagcccccccatgtgtgggtttacttccacttctgtaaaaggagaaaatactgactcctacagagcataatttacacattttttaaaaaatgtaatagggtgatcagggcaaagtgtttatcacagcacaatttcataagacagcatattttccaaataccatcattgtcagcaaacttctgcagagcaccgtcttcttatatgggtacagcctattcctccagcatcccactagagcttcttatatagtaggagacatgcaaatagggccctccctctactgatgaaaaccaacccaaccctgaccctgcaggtctcagagaggagccttagccctggactccaaggcctttccacttggtgatcagcactgagcacagaggactcaccatggagttggggctgagctgggttttccttgttgctattttagaaggtgattcatggaaaactaggaagattgagtgtgtgtggatatgagtgtgagaaacagtggatttgtgtggcagtttctgaccttggtgtctctttgtttgcaggtgtccagtgtgaggtgcagctggtggagtctgggggaggcttggtccagcctggggggtccctgagactctcctgtgcagcctctggattcacctttagtagctattggatgagctgggtccgccaggctccagggaaggggctggagtgggtggccaacataaagcaagatggaagtgagaaatactatgtggactctgtgaagggccgattcaccatctccagagacaacgccaagaactcactgtatctgcaaatgaacagcctgagagccgaggacacggccgtgtattactgtgcgagagacacagtgaggggaagtcagtgtgagcccagacacaaacctccctgcaggggtcccttgggaccaccagggggcgacagggcattgagcacggggctgtctccagggcaggtgcaggtgctgctgagggctggcttcctgtcgcggtctggggctgcctcgttgtcaaatttccccaggaacttctccagatttacaattctgtactgacatttcatgtctctaaatgcaatactttttttgtcctttttgtttctttgtttttttgcaacaggagtacatatcctcagctccacagaagccagggtgtcactttgggggcagaaataatcctttcgtggtcaacaggatgagagtcctgaggaatcccagggaaacctggagagtgttttccaattagactcagggcagagacctccatgggaatttctgattagaacgggctttgagctctgatgggagccaagagacaggctcacccagggtcggggtccttaaagcctgatggttttcacagctatcccccctcgtcttgtaaactcagactgattcagttgaccctttttctgctaatccattttgcttctctgtaggtttgattctcacagttcgctttcttcttctcttccctgagaacaaacgatgtgttttctgttttcagggaaaatcccagggctcaggtctgcaggacctgggtaggctgaggagactttctcactcaccattgtctggacactcctgttgtcttctgtgcatggaggcatttgggaaatgaagtggacattagtcattaagggaataatactagttttctccaattggatattgatgtagagctgaacttgtgcttctcacactgtcacagagtttggaccctcacctataactttgaggagagttgatgatggatagtccattgtgggtgagctctgggtaacagtaattgtagggtctggctaggcagcctaaggtcaatacttctggacctcaggaaagacaggctggaattcctgggaagacctgcatctgccatccaccgtggagtcccatcatcttctgttatgctgtgattgaatcagccccacctagtttatctagaacactcttcatgacttaggaaaacataatggcaagctctcctaacacctgtatcatgccatgggagcaacacctaagctagtgtgtgattgagtagatgagactgtggtctagtcaagacgacaggtaaaattgattgttgtcattatgatattttatatttggcaatataatcatgctcatattataaatacttttgctacattttttgagtgtgtcagaggctttggaactggaacaactccatcttgaataggggctaggaaaaataagaccgagacctgctgggctggattcctagtaagttgatgcagtaagttagtcacaggatgagataggaggtctgcacaagatccaggtcataaaggccttgcagataaatcttacagtaaagaagctgggcaaagccctccaaaaccgagacagtggctaaaatgacctcagtttgtcctcactgttcattatactctaattataatgcattaacatgctaaaaaacactccctccagccccaagacagtttacagttgtcaaggcaacatcatgaagtttccttgtgtggtttaaaaaggaggggaggaacactcaacttcaggaattgcctggaggactcatgaataatccatccattgtttaacatataatcaagaaataaccataaaatggacaaccagcagcccatactgctgctccacctctggtgtagccagtctcattattttacttgcataagaaacttgttttcattttaatctgtggattttccccaaattgggacccctttctcctaatatttgtgctattattcgtgttctgagcagaaaaccccaagatggaatgaagtttccctacatttttataagaagtacattcacccctttgagcgaaaatgcacagggagtggaatgaggctgggaagctaatggcgtatgatggaagcttgtccctgactggaggagagagggagggaggattgggaggaaggttcctatatttttgtgctatgcaaggaagctgcaaaagataactgagtctcgtgtaagtcagtgctacctctcaggggatccctgtgactccaagaaagggctcttcttaggaatcactgtggagtcagtcctttcattagagtagaccacaggacatgggcctcagcacacgccatgccacagatgtcagaaagcagctgctgggaacctgacccacctgcattttgctgcctgtatgtggagggagggaggtgcattctcagggtcagcacactgtttgtgaatttttatagagaacccctgcttttgctgtatttttattggaaaatatatgaacaagtgtgcacctgcaaacaactgtaattttcacatttccttcagttgcattatttcttaatcctgaatgacgtcctgacacagagttgagtttttcacaggcattgttcgaaggatcgagatgatgcattttccacattcactggtttttctccatgtgcagagaccttgagtagagcacatctggcccttacccacactatctcttgtgtcccctgggaaagagcagagatttgcctgactgcagaatctggggtaggagtctgcacacctctgagcctgcagagaagctcagcgaagttttgtggagtcagagagctttcccatgtggggaacctctagcttcctcactctcggagattactggtcagctgtaattgagtggttaagaattagagcacctgggagcctgtctcatcacagctccattatgtaacttaccaccattagactgcgggtaataactcaatcttgatttttctgacccgattttctcatcttattcattactaattttgtttatggaaaatgttatgtttagtttatgattaaaacctcagaactttctgaacttatcaggaataatacaaaatgtgtccagtttgggggaaatgtaaatgaatgtccatgcagtttgggtgtgtgtgtgtgcgtgtgtgtgtgcatgtgtgtttgtttgtgtgtgtgtggatatgtcagtcacttacaccacaatgaacatgattgctgaattacatagtcaaactaaaattagatttgctgaaaattgcctgcagcgatgtctgtgaagctgaccctgtcactttgctgtgaagaaactcagtgtacaggcgaggttgcacgggagagctaaaagcttcagcacacaggacaggctgagctcctgaactggagccaggcacaggactgagcacctgagaaacagaacccccagccctcctttatctgggctggatgggcaccagaggacccgcaggagatgctcagaactcacacaagacagagcctcagtgaggagcagaggcagcgaggaaccagccagggagcctgtgaccgccacctcgggttgtcttattttgcttaacagcatccaaacctcaggagaccatttattacgttatttagacctcacgccctttctgtcccgaagtaaaacaaacataaatatgactctgcagttagctctttgaacctgggttatttttctgagaatgtcatcttcgtcatcaacatcatggtcatcatgtcaaaatcaacaggcaaatccagtcaccgtgaagacagtttcatggcatgattcatacacaatcattccattctacagagaatctctttcagattcttaaggtggattaaagtgttatatttaattgccaattgtgaaattggtggaagacattatactaaaggaattgtctctgacctctcatggggtcatatttccagaaaatcattgtgatcctgagtgtgagctgactttccaagtgttcccaaccctcctccagatgagatgctggtctgtgtgttcttgctccttcccctggggcagattcctcttgttttccccagttgttccctcccacagctctcataatctctgttggtgtccccaacttccagatctgctgccatgacctgcagattaaagctctgattccgtaagaaagtgaggggagctgcttctcaatagagctttgatgggaacctctgttcatacctcaattcttaaggggctgcaccagtgccctaggatgctgattttcatggcttgctcctgcagggtaatatcttagttttgtagtggggatcagagaactgggtctggatgcatttcagaagtgtgagctcattctctcccagacagatactatgggaaaggaagatgttttgcaggggtaaatgattcaagagattagggcaactctccagtatgaggtcccttagaatttctcactataacatgcctaacacactcgacttcaagcaatccagtgtatatttgttcttcatcttgtaatagcctacattttatatgacagcctctgcctcagggaatttcatactctggcttcattactctctacaggaacttgcctctccctagatttcaaatattttgtttgttttcaaccctcaattatctgaagcattaagtaaaatttgcaaacttccatcttttctgtttatctgttattgttgatactattgttgtaagaatgaatatatgggcccggtgcggtggctcatgcctgtaatcccagcactttgtgaggccgaggtgggtggatcacgaggtcaggagatcgagaccatcttggctaacacggtgaaaccccatctctactaaaaatacaaaaaattagccaggtgtggtggtgcgcaccagtagtcccagctacttgggaggctgaggcaggcgaatggcgtgaacccgggaggtggagcttgcagtgagctgagatcgcgccactgcactccagcctgggtgacagagtgagactctgtctctaaaaataaataaataaataaataaataaatatgtgtgtatatatatatatttctcatctatgtacatttttaagcttagcagcatattttttagtgagatccagaataataaaagaatccaaacatttttcagctgcctaatagagaaacaaattctggtaaattttttcactggaatactactcaacatttataataaatatatttctggtacacagaacaacaaggaaaagtatctaagtatttatgctgagtaaaataagccagacaaataagaatatgtactatattactccatttatgtaatttatttcaaatgaaaaaaatctaaagtaatatacaaaagatgagtagttacctgggaaaagggtagaataaaggaaggggaaatgtggaaacatacagaagaacaagagaaaatgttgaggggaactcacttgtccacctcagtaatgatgacgcttacatcatgttttcaattctacactttaaatacgtgaagtgtattatctgccaattaacactcacaaaatttattgcaagcaaacaaatgaaaaattagaccaaaagcggtggtataaagatacaaaatatccattaaaagtcagaaatatctgagaatttacctcctgaaccctagttctctccttatttttaggtgaatgctagagtgccacaaaaatcactcaagttctcaatacaggaagtgggttccacaaagcacactaggcatgtccaattcttacctggagttggttcagggagtaactggggccactgatgtggagcacaggccaagctaccagggctcattcatctcagacatgagacacacacagcccctcctccatgtgtgggtttatttcacatctgtaaatggagaaaccattgacttctacagaacataatttgcacaaatatgtaaaaatataatagtgcaaaatgtttatcacaacacattttcataataagacagtgtatttcccaaataccataattgtcacccaactcctgcggggccctgtcattttatctggggtctgccgtctcctcagggttcccaccccagagctctctgtgtagcaggagacacgcaaatagggccctccccatgctgatgaaaaccagctaaaccctgaccctgcagctctggcagaggagcctcagccccgggattcccaggtgtttctgcttggtcaacactgaacatacaggattcaccatggagttggggctgaggtgggttttccttgctgctattttaaaaggtgatttatggagaactagagctattgagtgtgaatggacataagtgagcgaaacagtggatatgtgtggcagtttcttaccaggatgtctctgtgtttgcaggtgtccagtgtgagatgcagctggtagagtctggagcaaacttgacaaagcctgggtgtcccagagactctcctgtgcagcctctggattcaccttcagtagccatagcacgcactgggtcccccaggctccagggaagggtctgcagtgggtcccagttattagtggtagtggtagtaccatgtactacgcagactctgtgaagggccgattcaccatttccagagacaatacgaaaaactcactgtatctgcaaatgaacagactgagggcagaggatgcagctgcatatgactctgtgagagatacggtaaggagaagtcagtgtgagcccagacacaaacctcccttcagggtacctgggacaaccagggaaagcctgggacactgtgcactgtgctgaccccaggggcaagtgcaggtgctacaagggctgggtttcctgtcttgatctggggctgcgttgttaccaaattacccgagggaacttctctagatttgcaattctgtactaacatttgatgtctgtgactgctaaacttccctcacatatttgttttttgtttgtttgttttgttttgttttttgtaacaggaagacccatcctcacccctacagaagcccgagtgtcaccttgggggcagaaatgaccctgccttggtcacattgatcagtgtcctgaggaagcccagtggaacctggggagtgttttccagtcaggctcagggcagagacctccgtggaaatctctgattagaataggtttgggattcagacttgggccaagagggagtctcacccatgggagggtccttaaatcctgacagtttttacagctgttctccctcctctggcaaaactgtgcacatctgactcagaactgatccagctggcccttacttgctaatcaatttttcttctctctacacttcattctcatagttcccttttcttcccttcccagaaaacagagagtgtgttttctgtggtctaaatctcagggctcaggcctgttacctggaactcaggtgtggcccaggctgtggctcctgtgagacctggggaggctgaggggactttcccactcaccattgcctggacccgcctgctgtcttctgtgcatggaggcatttgggaaatgaagtggacattagtcactgaggggataatggtagctttctcaaatgagatactgatgtagagctgatcttctgtttctcacactgtcacagaatttcctccttcatctgtgactttggggaaagctaaggatggacactctattgtgctgtgagctctgggtgacagcaattggagggtctggctaggcaaatcctacagggtttcaggtcaatggagttggaatttctgggaagacctacactgtcatcctccatggagtcccatcgtcatctcttatgctctgatggaatcagccccacctaggttatctaggacaatcttcctgacttaggaaaaaaatgatggcaggctttactaacacttatattataggatcagtacaacacctaggttagtgtgtaactgaataaatgactctatgagtcaaggggacacataaaattgattgttgccatgacatttatttatttatttatttatttatttattggaaaccagagttttattgttactgaaatgagtctcgccaagcattcaagaatgggattttttaaggatagcttggtgggttgggggcagccagtgagtcatgagtactgattgatcaggtcagagataaaatcatagggagctgaaggtgtcttgtgctgagtcagttcctaggagggggccacaagatcggatgagccagtttattgatctgggtgatgccagctgatccatcaagtgcagagtctgtaaaatatctaaagcattgatcttaggctttataatagtcattttatccccaggagcaaactaggaagggttagaatttgtagccaccagctgcatgactcttaaaacataatttctaatattttggctaattcgttagtcccccaaaggcagtctagtccccaggacgaaggagatttgttttgggaaagggcagttattgtctctgttttaaactataaactaaactaagttcctcccaatgttaggtaagcctacacccaggaatgcacaaggacaacctggaggtttgaggcaagatggagcaggttaggtcacagctctttcactgtttcagttgcagctttgcagtggtggcttcaattcctccctttgagttttgaccttatcgacttgttttgtttctctttaagtgatggttttataaccatctatgaaactctaacaggtgctcttacatgcagatttctgattaaaaactctgaagatggttacaatagtatagagataaaactatcaaatagaagactatcttttttgacttttcacttaaaatgttgcccaagaaaacttttcttttgagctatttatagctttcaacaattgagtatagtcctgtacataaaatttggagaatatttgtttctctctgtccactttctccagaatttggaaactctttgtgaatatccttaacttatggcaatatgatttttcataagtgcagtaagatttttttttttttgcaacaggacacaattggagaaactggttattttaccaaggctttgactgtaatggcgtgcttcaccttaagcaatcgaacttgacttatacagccaataagagccccttgggaaaactggcctgtaccttgtccacacagtctttgtacaaggttcctgaccagtggtaagtaaagaatgtcactttctaacaggcccaagaaccccatgttttcctgggaccccagaggaaaaataatttaccagacttacaggtatttgatggtaaaaactcatggctgggcttggctttaaaaaagtcttatctgagattccttatggaacagagttccaccaaagccaattttaaaagcctgtgtaaacaataattatttgtattgtgctttatgcaaataataaggccatgaataagactaaagtttattttgcaaataaatcagtcctatcttgatttgttttaaataaaaatggggacaagagagaaaaaaattatgctttaaaaatatagtacacctgttgtttgctgttcttgtttttttttcttcagcagtttggacgaaattctaaattatttgtaggctacaaagccataaactaatgcgttcaaatctttacttttaaaactgcgaattgcactccttaccctagttctcattatgtactttatagtatgttgttccctcaaatgtggtgctagaattatagatgacagcactgacagctttgccatgcaagccttggaaccccaggcaggcctgcgtgagtacactcagacagttgcaatgaggttccagtcctcttatcttgaggtcagcacctacccctactacgccccaggtcatcaataaaaagttgtaacagtcttggcccttcttacatcttcattatccaacaccatgatttttgttttttgccaaaacaattgccaaatatagtcataatcataggataaataattttgctgaaatatatgtgttattattggtcttttgagatggaaagtccaagactggattatgctttcatgcatttttcataagaagtacttccactcttttgacaggaaatgcacagggggtgacatgtggctgcagaagctgatggcatatggtagaaatctgtccctgagtaaaggagagatggacggaggattgggtgaaacattcttaggtttctgtgctgtgcaaggaaggtgtaaaacatatttgagtctactacaagtcaacattacccaagggggaacccctgtgactccagcaatgactctgcctcagaatcactaaagagtccttcttttcattagagtggaccacaggatctgggccatagcatagacgtcagaaagcagcagcttgacacctgatccatgtgcattttcctgcctttaaagggagggagagaggtgtattctcagggtcaacacactctttgttgatttttacacagaacactggcatttactttatttcattgaaagatatatgaacagatgtgtgtctgcaaatgattgtaattttcacatttattccaattgcataatttttaaattctgcttgatgtcctggcacacagttgtgttttctataggtatttttcaataaatcaagaaaatacattttccactttcactggcttttctccatgtgcagaggccttgagtagatcatgtctgactattagtctgttttcatgctgctgataaagacataccagagacttggaagtttacaatagaaagagttttattggacttacacttccacatgactggaaaggcctcacaatcatggtggaaggtgaaaggcacatctgacatggtggcagacaagagaagagagcttgtgcagggatctccctttttacaatcatcagatctcgtgaaactcatgcagtattacatgaacagtgctggagaaacccgcagccataattcaatgacctaccactgggtccctaccatgacactgggaattatgggagttaaattcaagatgtgatttgagtggggacacagccaaaccatattattttgccccatggcccctcccaaatctcatgtcctcacattgcaaaaccagtcatgcctttcctacagtcccccagagtcaacttgtttcagcattaactcaaaaatccacagtctaacatctcatctgagacaaggcaagtcccttccacctataaacctgtaaagtcaaaagcaagttacttcctagaaacaatgggggtactggcattggataaacacacccatccaaatgacagaaattgcccaaaacaaaggggccctctgcaagtccaaaatccagcagagcagtcaaatattaaagctccaaaatgatcccctatgactccatttcccaaatccaggtcatgctgatgcaacagatggtttcccttggtcttgggcagctccacccctgtggctttgcagggtacagcctccctcctggctgctttcacaggctggtgttgagtgaatgtgccttttccaggcacatggtgcaagctgtcagtggatctaccacactgggatctggaggatggcggccctcttctcacagctgcactatgcaataccccaatagggactctgtgttggagctctgaccccatatttccctttctcactggcctagcagtggttctccatgagggtcccactgctgcagcaaacttctgcctggacacccaggtgttttcatacatcttctgatacccaggcagaggttctcaaggaccagttcttgacttctgtgtactcactggctctacaccatgtggaagctgccaaggcttggggtttgcaccatctgaagccatggcctgagccctacattggcgtctttcagccatagctggagtggctggacacagggcaccaactccttaggctgcacacagcacgggcaccctgggcctggaccacaaaaccacttttgcctcttaggcctccaggcctgtgatgggaggggctgccgtgaagacttctgacattcacaggagacattttccccattgtcttgaggattaacatttggctcctcattacttatgcaaatttctgcagctggcttgaatttcacctcagaaaataagattttcttttctactgccttgccaggttgtaaattttctgaacttttatgctgtttcccctttaaaactgaatgcctttaatagcactcaagtggctttttgaattctttgctgcttagaaatttcttctgccagacaccctaaatcatctctctcaagttcaaaattccacaatttgctccagttcccaatgagttcctcatctccatctgagaccacctcaagctagaccttattgttcatataactatcagcatttttgtcaaagcaattcaacaagtctctaggaagttacaaactatcccatattttccggtctttttctgagccctgcaaactcttccaatctctgcccgttacccagttaaaaagtcacttccatatttttggttatcttttcagcaatgtctcactctactggtaccaatttactgtattagtctgttatcacgctggtcccaagactggacaattcataaaagaaaggtttattggacttacagttccacatggcttgggaggcctcacaattatggtggaaggtggaaatcacgtctcacatggtggcagactagagaagagtgcacatgaaggaaaactcccctttttaatccatcagatctcatgaaactcattcactatcacacgaatagctcaggagagacccatgcccataattcagtcacctcccatcaggttccttccatgacatgtgggaattgtggaagttacaattcaagatgaaatttgggtggggacacaaacaaaccatatcactgaccttctccgcatcatctctcatgaccccagagaaagagcagagatttgtctggggtaggagctgctcctgtggaacttagaggctgcagacgaccccagtgcagttttatggagtaagagagttttcccatgtctgggaacttctagcatacccactgccagagattgctggttggctgttattgaggggttcagaattagatcacctggtagcctatctcactgcagccccattgtgtaacttaccaccaatggccttcacgtgaggactcaatgttaactgttctgacctcattttcttacctcctttatttgtaagtttggttacagattttttttttactttaatttcagggatatgtgtgctgaatgcgcaggttttagtttcttattcaagccttataattgctcaactgatcaggaataatacaacatgtatgcagttttggggaaatataaatgaacatccatgcaaaattttttgtttggatatgtccgtcagttacacccctatgaacataatagccggtcctcaccagaaattgctggtcctcaccgatctcaaaagcatctagatcttcaacttcctagccttgagaattcagaaaacaatgtttatgatatttctgagccacccatttaatggagttctgttatagcagctgaaacagactaaaccatttaccaagtctcagtaagggcagtgagggtccaccatgcttgagagacaagcattactctctcatttgcagctcaggatgacagaagcatgatcacgagctgatctgaaaagaagatgtggctttctctccctcagatctcagttgaagccatggtgtcacatctctatggtggagactaaattccagtctgtgatgtaatggatgcctgcctcctcccaccctcacttacgagacagagtttccatgccatgcgttattgaccaagaaccaagaaggactccaattattctcacccctgctcacttgtatggcagaggttctggggatattcctgggagaggcataatgagactatttaagtccacgattcccaaacagttttatgctcttaaagcaggagtatcactttgagatatatgaataatttcatgtgcactaaggtggaggctgttatatttttataggtaaagatgcatggcataaagacagagatacagcactctggaaattgtgtgactatatttgcagttgactgtgaataatttttaccatgaagttatcctaaaacacataatatatttttactgtaagtaattaatgaaaagctgacagctccacaagagcaatatccacttggtttagcagagagaatgagaaatagcataatttaagaataatcagttagacactgtgccatgtgcctgtattttcaactagtgaggatgctaatgtgggaagatcacccaagcccaggatttcaaggccagcctgcaagatattgctagacccattttcttaaaaaaaaaaaaataacattctgggtcatgacaaacctcaaaaactgaccctctaaataggaacaaatttaattgcattaaaatgtggatgaatttttgacacaaaacagtgacagcatgccagcaatgagtacagaataacatccagttgttatgttaagagatacagactccgaaaaagagacatcaggtagaggctgtcaaaggcctcactgcctaatgactgcttttccattgatactgtgtgtatatcccggaatgcacctgtgaatgaggacatcatgtctttcatagtgtgagagaaagagacattactacccatctgacaaaggattgatcagaatataccaggatctcagacaactctataggaaaaatatctagtaatccgaataaaaagcaggcgatatttatttcttaaaataagactttcaaattgcaaacaggcatataaaatgtgctgtgtaacactgatcatcagaacaatgcaaaacaaaactacagtgaaatatcatctcatctgattttaaaatgatttcatccaaaagccagacagaaacaaatgctgggaaggatatggagaaatgagaacactcataacctgttggtgggcacttaagttaataaaaccactatggagaacagtttagagtttcctcaaaacctaatagtagtgttgtcatataatccagcaatcctgctgctggcatgtactccctcccacaaaaaaaaaatgttgtttgcactaccatgtttgttatagcactgttcgtaatagccaaaatttgaaagcatcctaactgcccattaacagatgatggataaataaaatgtggtacatatagcatatggattaatattatgccataaagagaatgagattttttcatttgcaacaacgtggatgaaactggagttcattatattaattgaaataatcccagaaccgaaagacaaacttcacatattctcatatatttgtggaagttaaaaattaagacaactgaactcgtggagatagagagtgaaaggatggtcaccagaggctgggaaggtctatggtagatggggattattggggatgctcaatggatgaaaaaagtggttagaaataacaaataatacatagtatttgataacacaacagactaagtataatccttaataacataattatagattgtaaaataactaaaagtgtataaatggaatgttggtaactcaaagaattaatacttgaaaggatgtaggaaccattcatcataatgtgagtattatgcagttcatgctatatcaaagtcaggtaccccataaatatacacatataccatttacccacaaaaattcaaaattaaagtatttatgtatctcatcttctgtatctatattacattaaacctaagaagatactggtttcttcacactaccaagatccacatagacatccgtagccttctttctttgcctgtccataatctgacattgaaaaatgaggaaacctttcctatcatatgacattaatttacttagtgcacaatttcaaaatacacaaattgtgttagaattattaaactgacccttgttgaaaatatgtttatcgactagaataccgtgcttatatgcagcttatttatattttacaatcacaacatcaaattatttccaaagatacttgtttctgatattcatgcccccctttctgcagtgaaattagtacaaacctgtttatcattgttagatatttttatacagctttcattttattctgtgtttcatgaccagctaaatacttttgaagttgtatgcatttaggttaacactttgtctcaaaaaattatgagttttcacaaattatttatgccatgtgtttatcattgaacaccatgaaaatagtttcattgtgattaaaaagtgtgtgtttcacctaatccacacaccttttccccagattcctggaaaaccacaaaggtttactggatctatatttttgtctttggcaaaatagcctggctattctcttagcttcttctgcaaagcatcaagattcaccttcactgactgcagcatttattgggccctgatggctggaggagaggggctggagtgggtggtagccatgagtgacccaagtggaagttctcagtggtgctctgctccagcacaaagaagattcacagttcctggggacaacacttaacatcacaatctcccttaaaattatctactggaaagctgaggagtaggcagtgtattactgtgagagacacagtgagggacatatgggtgagtctagacgcaaacttccctgcaggaagacaagaggggactttgtggtaaatggtgctcagaaccactaggggacactcagaaccactaggagacactcaggatagcagaaggtgctcaggatgccgcagggtgctcaaaacactaggggtgctcaagaccagcagggggcactcaggacaccaggagacacttaggacatcagggggcgctcaggacaccagggggcgctcagcacaagcaggggccacagaatgacaagggtgcattccagaccaccaggaaacactcaggaccaacaagagattctcagaaaccaccaggtgtaacaggaccacctaaaggcccacaagacaaccaggagacactcatggccactgaagaacattgaggacaccaggggttcagggccaacagggagtgctcggggccaccatggggctttcagtaaccacgagggaatcaatcactcaggacaccacggttttcttaggaggcagctccacatcaggtgcctggggaaggtgacgtttgcttttagacctagctgattcctgagctggtcaagcaaaagtcttcccacgatctctcactatttcttccttgtaacccatggtttctttcacatacaaatcattaacttaggataggaattcaattcaacttttaaccttgcatatttttagaataataatagcaatagtaattcaatgtgttttgataataagaaattgtgtatgcctaattcaaactctggttccacgcatgggtttttgtttcttgtgctgtgccagtcacactacagtcaatgcttttctaataataactcaacaatgtcacggtgttaagtttcctttcattttgtctgccatttgtggagatgaaacaccactttcacgggtcagttcctccactttggttgggttctggtcttctgctcttcacactgtttctccaccttcccttctgtcaaatccttttgtcttcctcagtctcctggcaaagaagcaacaaatctatttattttgtctcctccacgtctggtgaatctgttcacttctcttcatgatcattgaacccaaccatgtttagaaggataacagttcaccttacaatatgctcatgtaggtcaggtgcagtggctcactcctgtaatcccagcactttgggaggccaagacgggtggatcatctgaggtcgagtttgagatcagcgtggccaacatggcaaaaccctgtctctactaaaaatagaaaaattagccaggcatggtgtcgggcacctgtaatcccagctactcgggaggctgaggcaggagaatcacttgaacccagggtgagaggctgcagtgagctgagataatgccacttaactccagcctgggcgacagagagaaactccatctcaaaaaaaaaagcatatgttcatctatccgcagactctctgacatcgtcacccttttctagggtcctgcagacatcaccccacaacatccagtccttttcctaagtaccacagagtgggctctgcagctcctgctgctctctgtgtgctcagcgctgaggctcaccagtgctttgatgatgaagttcaaatccctaatgtgtttgcaattctcagacaaccctctagcaagctgccattgtgagtgcattctggggatcctgggctgatttcaggtccatattgctggatgttctctagcatccaggcgtgttggcaaataaacatctagaatttgtattgaaaatttgtggaaaatcaatggtagaaaacaatcctaatttctaaataagaacattttatcctgactttataaaaacacaatgttaatttaaccaataatgtaataaaatgtgtttaaagtgatgtttatcttgttattagatgtattaataattggtattttaaagtatactaacagcataaatgacaaacaaaccaacacagcgattatacataaataccattgtacattaattaatttggcaagaatggcatttattttcatttctaccaaaccttgcctttaaatatgtttgttaattggcattaggatagtgaaacaatcacacagagcaacaacattttggaatattacattatactataaaatagtacattcgattcaattatataattaaaataacattaaataaattcatgttttggtttgatatttggatatgtgttcatttttgtattttctttttttgtatcttttgtagagatggggtttcaccatgttggacaggctggtctcgacttcctgacctcaggtgatttatcgggggaacccacccccaatatttcaatgtagggtctttctattttctgtaagtgtcggctggtctgagaaataaagagaaagagtacaaagaaaggaatgttacagctgggccaccgggggtgacatcacatattgataggtccgtgatgccccctgagccgcaacaccagcaagtttttattagggattttaaaaggagagggggtgtacgaacagggagtaggtcacaaagatcacatgctttaaggggcaaaaagcagggcaaagatcacatattccttccccagggtattaattactaatattccttgctgggaaagaatttagtgatatcttccctacttgcacatcagtttataagctctctgcaagaagaaaaatatggctctattctgcccgaccccgcaggcagtcagaccttatggttatcttcccttgtttcctaaaatcgctgttgttctgttctttttcaaggtgcactgatttcatattgttcaaacacacatgttttacaatcagatttcatattgttcaaacacacatgttttacaatcaatttgtacagttaatgcaatcatcacagggtcctgaggtgacttacatcctcagcttacaaagataacaggattatgagattaaagaaattatgaaagtattgattttgggaactgataaatgtccatattaaaatgaaatcttcacaatttatgtttagagattccagtaaagacaggtgtaagaaattataaaagtattaattttgggaactgataaatgtccatattaaaatgcaatgcctagggccaacaaaggagtcatattaatatgaaaaataatagctgaatattttggaaatgacacatgcagtaacaaatgtctatatgaaattaagaagatattgacacaaaattgagaaaaaattaacataattatgctcactactggtttataaaatgcctataataacactttttaaatcatattatagaaaataaaataactatataaatagcactctctttgcttgattttagtatttggtgcttcaaatgttttttatacaaataaacattggtcattttttgatggtaatttcaatattttcttccagaatacatgttcataaatgtaattgaaattgtataattttcagaaacttattttatcagttgtgacttgtatttttatgatagtctttttacatttatatacttttgattcagaataattatagataaaaaaattataaagttaatacagtgtgttcccatctccaagtatctcctaagatgaatatcctctatcatcataagacatggtgttaacacatttacattgataagtgtaaatatattcaataccagaccttattttatttatcatttttccaataatttctattgtaaatgaaaaataaaattctaagcttcctcaagcaactaaatgaactcaaccctcagccaagggaatttcaaagtaaattctaaaacttgttccagcaatgatgggaaagtgagaggtcagacatgcctcattacatgctcctctctttggaattaaggcaccagtggccagcattagtactacaacaaagatcttaagacgggcaaaactatatttttgctgtaaacactttctatagcaaaaagacatcaaattacaacttgattctagtatagcatcacatgacaaatagcaaaacctaatgatttattctgtatgaaatctgctacctggaggcttcatctacataataagaactatgatctccaggaccccttatcttaatccagacactcagttgtaatgattgtattaccttacatttcaaccaattgccaatcagaaaatctttgaattctcctatgtcctggaaccctgtgcataaactttcctgcctttctagactgcataaatggtatagctcacatgtgttgattaatatctgcctgtaacttctgacccactaaagtatataaaatcaagctgtaatcaagccattttggacatgtgttctcaggaattcctggggtcgtgtcatgggccttggtaactcatatatatctcagaatgagccattttaaatatttcatagtttgtcccttttagtggatatcttcttttcttttttttgggacagaatctctctttgctgttgctttcgtatatttgtttgtttccagattccatcaaggccatcagtttgaattcagttgtcttgttcctttattctcttctggtaaatgacagtttgtatttctgaagttttctagttgaatattttatagataaaaatttatcaagtaggttgatagtgccatttgggactcttatatctttacctatttaatcattgcttgttttctcaatcacaatgagtgttgatttctccatgttctatacatgttagtctattttctgttccaaatccatttattaggtcttttaaaatggattttggaaaagttgatcctattattttatgcaatatttcacttgagttgcaaaggtattctttttatgattattttgtctgaaattaacatagctattcaagttttctttggtttatattttcatggtctatatttttccatcttatttcttctctttgtgaatatgttaagaagttttcttggagaaagataattgctgggtcttttttttttttagtcaactatgaggaattattttttaatgatattacccttttgtccaataatggttgttttgtctttttacaataatatgtattgtttctattaatttattatttaattattattgatgaatatcttattggttaccataaggataacaataagacatttctataattgaattctaattcaaaaatgtagtacttctttttcttttttatttttttgagacggagtctcactctgtcgcccaggctggagtgcagtggcacaatctcagatcactgtaagctctgcctcctgggttctcgccattctcctgcctcagcctcccaagtagctgggactacaggcacctgccaccatgcccggataattttttgtatctttagtagagacaggctttcaccgtgttagccaggatggtctctatcttctgaccttgtgatctgcctgacctggcctcccaaagtactgggattacaggcatgagccaccgtgcccagcctacccctttatatatagaacagagatattataactatatatgtctaattcctcttttctatcccttttttattttatcagtttgtaattacataagctataaaaatgtaatattgacatttttataattgctttacacatttatgtaataaagaaaacacaaatgcaaaaactaaatttaaacctcatttttttcattgttgacaatctttatcttttggatacattcaggtattggatgtatatcatatggctgctcatctagaaactctgctaaaacgtctatggcaagattaatatgctgggaatagattttctcaggatttgtttgtccgacagagtatttatttgtctttgatttatcatctcaagagacaatgtcaagaagatgctgtttctgcaaatgggcaatctgcaaaccaaggacacgtcactacattactgtgcaagagaagcacatgaggaaaggccggtgtgagacacaaacctccaggaacacctgggctaatgagctgcagggggtgctcaggacccactgatcagtcaaccacagaggggagtgcaaaggttaggactgctttcctgcaagcattgaaaaaagaagaaaaaaactccgtctgacagtttctccaaggaacttctgtaattttagaattctgtgcctaccaatgacatctccaaatatttttttaaaatattgtgttttgaggacatactctcacatggacaaaacacaaattgacacagagatgaaaagccctcaaccatagtcaccaaaattggagacatgtagaagctcactgggacctgttgagtcttctccaatcacactcagaacagagaccttagtgggtctcccttagagtagtcattaaggatggtgataacagcctaaagatggtagaccatggtcagtgtcatatagaatatggggaccctcacaagttttttgtctgacccttctcctgacactaaattatgcaaattaataacactgatctggtgcttcttttgattctaatttattttatttttagttgtcgttctcacttttcctttggattttcctgctccctggaaaaggtaaatgtggtctccgtgacctcaattcaagggctgaagccctttccctgtagctcagctggggctcaggctgtggctactgcagccatgtggaagaggctgaagggactttcttcactctccttgctcaggaccatccactgtattgtgtataggcttctctggaaatgcaagtggccatttgtagtgaaagaaatatgtttgtctggttaaaatgggaggtggatgtagagttaattggctgctacataaactgtccttctccaccagtgcttttaggatgagattgtgaaatttgtaagaatcaaaatggagtcacatatgttaaaaccctgacaaatggattcaggaagtgtagggagaattcttacacacatatccctgacaacaagaactatcataaaatagttcttgcaaaaagaccaacatgacctcataatcatgacttctgcaaagacttctactcagaatctacttgcccagccttagattaatgccatctgaattacactgatcatgttactatcactgctcctcaccacagatgcaacaccctcctgagtcctgaaacctgactccatcccatagagtagggcacagatgaggggaatgcaaatctccaccagctccaccctcctctgggttgaaaaagccgagcacaggtcccagctcagtgactcctgtgccccaccatggacacactttgctccacgctcctgctgctgaccatcccttcatgtgagtgctgtggtcagggactccttcacgggtgaaacatcagttttcttgtttgtgggcttcatcttcttatgctttctccacaggggtcttgtcccagatcaccttgaaggagtctggtcctacgctggtgaaacccacacagaccctcacgctgacctgcaccttctctgggttctcactcagcactagtggagtgggtgtgggctggatccgtcagcccccaggaaaggccctggagtggcttgcactcatttattgggatgatgataagcgctacagcccatctctgaagagcaggctcaccatcaccaaggacacctccaaaaaccaggtggtccttacaatgaccaacatggaccctgtggacacagccacatattactgtgcacacagaccacaaagacacagcccagggcacctcctgtacaaaaacccaggctgcttctcattggtgctccctccccacctctgcagaacaggaaagtgcagctgagatacgttttcctgccagggcctgcatttcccatccccattagactcagagccctgtcttcctccttcttctttaataataaatggcatgactcctgttaatagttcatagaagcagaagctgagtcctgtttgtcaaacattcagcatgaaatgttcatgttacctgggccagatgcatcactggtatgtggccgccagtttaatgggctcatactactccaagcggccgaatacaaaacagcagaacatatgcctttattaaactgcaggaaatgacactggagaaaaatgtggggataagggagcaggaggaattgtgaaaattcagataatagcttttctcgtagagagaaaggtgcgttaataaaataattttataaaacaataaaacagatggaatgtgtccccatcacggagtgtctcacagtaacagtgcagaaataaatttctaaaaatgtcgtagggtaggtgtgatagacaaggcttatttccacacagggagcccataaatacccatgtaattaaaaatccagctcttagaaagggagtgcctcaacttgacatcagaaacccacgtcagtgagtctgaggagcaatgtggaaaagaaatggaaaattcaacaatacctttcttatgaaaatcctagctcacgtttcaacatgaaacataactgtctacaattttaggaaaaccatcccatggcaacaagtcactacactcaaaaggtactgagctaacagagttccagcagtgagcaggtcagtgctgaaatccccggagaatcaaggctctcaggtacgttgtacaaaacccagaactgagccacacaatctatggtcaagtgatctttgacaaagtcaacaaaaatatgcacggggaagaggccacgctcttcatgccatgttgctgggacaattggactgccatatgcagaagaatgaaactggacaccaacctgtcgacatatacataaccataagaaaatggactgaaggcttgattataggacttcaaaatataaatgtactcgaagaaaacaccaggagaactcctctggacattgggcttagtaaataatttaccacaaaaacctcaaaagcacaagcaataacatcaaaaatagatgaatggaatttagttaaactaaagagcttccacacagcaacagagtgaacagacaaattgcagaatgctaaaaaatatttgcacacattgcatctggcaggggactgataggcagaatttacacggaactgaaacaaccccaccacaacaacagctatgaaaaaacaaataacctcattaaaaattggcaaaggacacgagtaggaatttttttaaagaacacatataactggacaagtgctaaacatcactgattatcagggatatgcaaattaaaactgcaaagaggtatcttacaccagtcagaatggctactataaaagaagcaaaaatagcagacatcggtggcgatcaaaggcaaagggaagtctcagtcattgttggtgaggatgtagatgagcacagcctctatggaaaacaatgtggagatttttcaaagaaataaaagcagaactacctttgattcaatgaccccaccattgggtaactacccaaaggaaaaataaatcatcatatcagaatgataaccaaacttttgttttcctgcagaactattcacagtagcatagatatcaacctaaggaattaacctgtgtcttacaacagataattttatttaaaaagtcacatatatatacaattaaatactatccagccatattaaggaatggaatcatgtattttgcagctacatggatggaactctgggtcattattttaagtctaataaacgagaagtagaacagcacacaccacactttttcacttataaatgggagctaagtaatatgtgcacagggccatagagaaaggaatgatggacattgcagactcagaaacatgggagagcagaagttgggagaatggtgagaaattacttaaagggtatgatgtacattatttggatcatggatacattaaagccaagacgactatgcaatatatatatgtaacaaaattgcagtcactccccgtaaatgtatacgtataaaataaaaacaaatacaattgaaatgtgaaattattaacagttgatcaacaatcctgaaaattaaaacgtgtgatcaataaatgaaaataattttagttgaacttcatcaaattttaaaacattttctattcaaccgactatcaagaaactgaaggacaagcttcaggggagaaagtatttgcaaatcatacatctaacaatgtaattataataagaaccctcaaaactcaacagtaaaaagaagcaatctgtttataaaataggcaaaggtttgtgcaaactttctatcaaagaagatgtacagatgacacatcagcatatgaatgtaattttccagtagagaaattcaaatcaagaccaaaaggagacacgactttaggctttagaatgaggaaaaataaagaagaaatactgacagtaccagtgtcagtgagcatgccaggccccgagagactaaaatattgctagtgcaaaatgaaagagtttctgggagaactgtttacagtttcttataaaattaaacatgtccttaatccatgacctagaactctcatccctgagtatgtcctacaaaggattaaaatcatgtgttcacacacacacgtattcagatgtttaacattgtgtgtgtgtgtgtgtggtgtgtgtgtgtgtgtgttagaaactaaaaacaacatgaacatctttgaaaatttgacacaaaccattacaggtgaactccagactttcttctgagtgacagaaggcctgcctgaaagatccccagagacacagtcatggatttcactgtcaccctcacatgtcactggcttgggctgggctctctctggctcttccctgaccaggaccagatgttgagctccactacctgcagttggaagtttatattttcaacaatgcactgagggctaagttgctctacagactgaaccaaacaaacatgggcgcctttgaacaaacagtgcctgacatttgtaccgaccccaggagaactcttcccgctctctttcttcttggttctctcctgcaggccagcagccctgcagtttagcctggacctctcatgcatctacccatctcctcccaagtgcattttaccacagcctccactgtttttgtaattctccacactctgttgtaaatgaagtcaggtccttcgagaccagattcgggactctattttatgaccaaatttcagcctcacccccactcctgagacagagctcctaaataagattctgcaggtggagattaagagcgtttttcttcctcaatgtaggagatgagtgctcagtggagggatggggaggagctttccactttaccagcatgcagatcctgctggggtggaccctctgccataggagcagggctgggaaccaggcagccaatgtcctcctccttggtgctgcactcagggcagagcctgcatccatgagtggggctgtgtggaagaagtgagtctctggttctcagtaagtcttgtctagaactgagcctcagcagcatgacctgtgggcaaggtcggagggccaatgtcctggcccctggggaagagtgtgctctgctgggagctgggcagaaggaatcctgtctacttggctgcagccatctgtggtggaatttacatcatgctgagctcgggcatagaaggaaggaagagaatctttgatcaaatatcaatatcatgtctgaccttactgaggttttgtagattatctcgaataaatgttccttcactttctgtatgttgacagggcctttccagacccgttaatttttcaaaattaatctcaccagtttcatggaggcatggatatatcgagctccttgtaccgtcatgtgagatgtggaactgtttccttcactggttataaaataatgggttgacttttttcccaacactttacagataccatcaattgtcctattgcttatatggttataaccaaagcaatgctgatattattcatttctattctattgcaaggtatgccccctctactcgtctccaattgctggcatgtatttccatttgtctgtatgttttagtaatttgaatatgattcacctaagagtgtttgtgtgtgtgtgggtatgtgtgtgtcgtgtgtgtgtgtgttaagggcttatcctgctatttggtgttctctgacctgcactgatccatgacttacaatttctctaatttggaggaaaaaatagagggaaagtgagtttgagtccagacacaaacctcactgaagtgagcacaggattctaaccccaggggtgctcaggacacgctgatcacaagagccagcctcaggggcaggtgcagatggaggctgagctcttctttcccgtcagcactgtggcttcttctccataaaacatcttcccttgaggaatttatctgaattcatgattttttgcttatctccaaagtctctgaaatgaaaatgtttgttttaataaaagaaaaatcttctcacatgtgtaaaagacagtttcctacagtcgcttaatcttgtctttaaatgtcaattatcaatgcttctgaagtaaatcagctaaatctataaaagacactttgtttaactcaacactgcagcccagcatgacagcactgaaagggccagcaagcagcaggcaggatacggtgcatgccagacactggggcggaaggagttagtatccagtgcaagagaagaaagtgcccgcggtggtcactgtcaggacccaagctcacagctccaattgcaggtgaccccatgcaaaggaaaagataccctcaccaatgtttagtgtggatgtcgagtctgatggtgccacattcacacaccacgtgaatatggaaagatttaccaactccattattgaggcgtctgctgagggctgcacaggcctctcaataaagtccaaactggctcaatagagcaggaaagaagctgcctcagggtttttatgatggtttggtgttgaaggaatggtggggcttcctactaaggggaaggagcttgtataatttgaacctaatactggcatccagtgaggacacttccatgattttctactaaatttcccatgtgtgggggacaaaagtgaaggaaaaggattaatcctgtcatcagtaatgaggcatcaaaatagagtctgatgacttattctacttagcaacttaagcaaatgagtgaaaaatgaggtaagtgttcactctgggtggacagcaaataggtctgcagaaaatagagtttttttaagtgtaagcacataacaaaaagaaagagaagaacaaattgaacagggatcttggaccaatgtcctgggtggaagctcttcactctgtgagatcatcagcttgctctgagggtctcgggtcaagtccttcttcaatatatctcaggccttacaggatacatgggaatgctcagcttggtgtccttcactagggaaaagaaagagaaatcagactgtcactgtgtctatatagaaagggaagacataagagactccattttgaaaaagacctgtactttaaacaattgctttgctgagatgttgttaatttgtagctttgccccagccattttgacccagccactttgagccaacctggagctcacaaaaacatgtgttgtataaaatcaaggtttaagggatctagggctgtgcaggacgtgccttgttaacaaaatgtttacaagcagtatacttgataaaggtcatccgcattgtctactctcaataaaccaggggcacagtgcactgtggaaagccgcagggacctctgcccttgaaggcggggtattgtccaaggtttcttcccatgtgatagtctgagatatggcctcgtgggatgagaaagacctgaccgtcccccagcctgactcccgtaaagggtctgtgctgaggagggttagtaaaagaggaaagcctcttgcagttgagttagaggaaggccactgtcttctgcctgcccctgggaactgaatgtcttggtataaaacccgattgcacttttgttcaattttgagataggagaaaaaccgccttatggtgggaggcgagacatatttgcagtaatgctgccttgttattctttatgccgctgagatgtttgggcggagagaaacataaatctggcctacatgcatgtccaggcatagtaccttcccttgaacttaattacgacatagattcttttgctcacatgttttttgctgaccttctccccactatcaccctactctcctactacattcctttttgctgaaataatgaaaataataatcaataaaaactgagggacctcagaggccggtgccagtgcaggtccttggtatgctgagtgccggttccctgggcccactgttgtttctctatactttgtttctgtgtcttatttcttttctcagtctctcatcccacctgacgaggaatacccacaggtgtggaggggcaggtctccccttcgtacttgagcagccttacaactgggtgggtttatgaattaattcctcggttgcattacatgaaaaatcacacaatctacaaattttaaaaaataagcctttactttttataaaagattacagccatttcacaggctgggaagcacagccattggtgaagacgagagacaggcactcccaaggaggagcggtggggcagaaactttatgctgaacgtgttggctaaacagacataatcaacggattacaggaggggctatgcgtgttcataaaggtggtcatgacacatgaatatgggagcaaacatacacgtcacatgtgacccacttagcagtggggacttagcatttaaatgtgttacagttaggccctaagtgccaaaagctggagcaggggcacaaagaccctcagagcgcagcctccataaatggccagaaccaggccttggtcagtggtctctgatcaggagaaaattcctgaaatcaatctggtgtcccatccaagctggggttatggctgtggaatggggggtcagttagtcagaggatgagctgcagttggttaaatcgtgcttatctcaggatcagtgcttattttgctgctacagaagaaaataacagtttatattctttaagagttggggtgagggatgtaacccctgcctggcatggccttaggtcttgtttataacggggcatcttattgccccagagaatctgttctgtcagtcttatgatctccattttaatgttagtgttggtccatgttgtctctgaaccacaaaagggagtgggtataatgaggtgtgtctgatctcttgttctgcccagctgggaactcagtttttaggtgtttttggtgcctccttggccaagagggggaaccactcaatctcatggggtgactgcaattttacttttagtttaaagtttataaatatggacctaagtattgacattctaaaagtcactcctttgttttggctaaaagtacttggcaagagtccttgaaatgaggttcaagagcagtattttctcatgactttatttgcaatagacacatgagagactgttgaaaagatgaagtaccaaagtagccttaatctgttggtgaatggagttggtataatacagaaatcactttcaatattttgtaacacatgcatgcgtgcaataagacagcggtgagcactgagtgtaaagtctctaaaggtacgatctttcagccaccaaataatagtgtaataacggacatactctggaggagctgactataataccgtaacaccacggggagaaactttggccaaggaagtccaagattttcttttccttttcctttttttttttttttttgttgttgttgtttgagacagagtctcactctgttgcccaggctagagtgcggtggtgcgatctcgactcactgtgacctctgtctccctgattcaagcgattcctgtctcggcctcccaaaagctgatattacaggcatgtgccaccacacccagctaagtttttcatatttttagtagagacggggttttgccatgctggccaggatgatctcgcactcctgacctcaagtggtcctcctgccttggcctcccgaagtgctggtattacagcgtgagccaccacacccagccgagattttcttaaagttttgaagattttaatttaagggttacaattttttcaacatttccagaaagctgtagacagtattattctgtgttatatgagtgattgtagttccttccatttttagatagtattacaaacaattttagggctgcttgctttaaatagatagatgatagatggctacatacatacatacatacatacgtacctcgatagagatatagttgcaaacataaatacatagatagatagagttacagatgtattttagttattatgctacttttttctttgccttttcttcctatgttatgttagtcaggtctccaggacttaggagtgcatttacaatcccttcccttgtccattttgacgtgttctagacaatgcgagaatccttttgtgtgtggatcacttccaagtcatgtactacccttgcaataaatgtgtttgtgtatgtctttgccttactgacaagctctgctgagtgcagttatttctgccgtctgagctaactttacacttggtagagaaatatattctagatggaggcttccactattaatttaaattactaattcataacctccagcttaattattgaggtataatctatcagagatggtattagaacaaaggtttccaatgaaatctaacataagggatgtgaacaaattttcctaatttaggtaaaataaccctgagcccattcttagtatccagccatgtctcctatctatcacactgaatctcacactaactttgacctgacttgggacttgtaagcttcaaatatgaccttttgattgcaatgcctctaattcaggacgtgtggttattttagccaagagtaaagaaaaccaaatttaactcactaaaaatgacgaagattaaaacctaatgaaatggaaactgggatatgagtggctccagacttggctattttaagagtctatgtgcccaggtgatttcttttctccgttttacacacaggcaaacccaaaatgtcagcttcatctcccgttgactctcatcatctcgttcttcatcagcttgcttagaatgttgacttccagctgcatccatgttgccacaaaagacatgattttattctttttctgtgaatgcatagtgttccatggtatacatgtaccatattttcttgatcaaattcaccatgaaaggacacataggttggatttatgtcttaggtattaagagtagcatagcaatgaacatgtaagtgggtgtattttttggtagactgatttattttcttttgtgcatatacccacatatgagatggccgggccaagtggcagctctgcttcaaatacttttcaaatctccagactgctttccacagtgcttggactaattcacattccacccaacactgtacaagtgtttcctgttctctgcagcctcgctccagactgctttccacagtgcttggactaattcacattccacccaacactgtacaagtgtttcctgttcttcgcaccctctctccagactgctttccaagattcctctcctccactttgacactttggtatatccatgtgtgtcctctctggttcagccagggacagagaaccaggaagacatcatgcattttctagagggagctggcttggggaatcaacgaccggagtagaaagtgcctctgtccatgcatcacaggcctgagggccctgggcaggaggtcaggaagagaggatgaccagacagctggggaaactgggatgaacaaagccagtttccttcctggtgaggagggacaggtcgaagcctcgtgtccctgtagggatgaagcacactcacctgcccactgctacctgcaaatcaggtgaccttcagagcagcagctcctgagtcactgatggtgacttcctcctcctccaaaccctctaggatctgtgcttctcagagtgggaacccccgcaggtccccaagttttcaatggattcacctagctagtgtctctcctcagccccatccccaggctgctgccctggtgctgtgtacactgtcacaacaggggtgacagtaacagctggtgcctgcactttccaggccaagaagtttgaaagaagcaagtcacagggccagccgggatatggggtaatcacacaaatttccttcttgggggaagtgctgggaaacatccttgagtcctcctcagctcacatgcggctgctgctgttcatcccagtgtggggacacatgagccctccccatgcccaggatggagctgtttcaatcacagcaggatgggaatgtgtcttctctatgggggctttcggagcacagctctcctgttcctgagatttgagatttataaagacaagtcccacagagtggacttgcacaaataagacagtacaggatccccaggagagacatcccatatgagaagggacaggcaggtcccatcactgacgctggtcctcagaaaccctgaccagctactgaccttcccaggtcccctgttcctgatcagtgcctgtgtctgctcctgagaagatccccatcaacagtccccagggttctgcccccttccttgatgtgcctctgggagtggggctggctgggctgtgggtctgctgtgactttccccacaggtcagcggctcagtgcaggctgcaccgactcggtggggctgggctgtgtctgactctcccgggggagcctgaatgcttctcagaggcatttgcaggatcccaggtcctgggagaacagggaagcaacagtgtgtgcagggccccgtctccaggtgtaaggtgtttgctgttgctctacttgacaagggcatatccccaggcctaggggcactgtgggtgcacaaccaatgtgctagacacagggagtaaggcacagttccctcccattactgtggggaatctaggcactgtgtgtgtgtgtgtgtatgtgtgtatgtagattaggagttgtggagtgggcaggtttagaaattatctgatgagatgttcatccaaaggaactgacaagagattaggtgttttcccaaagtccctgggagttcctggactcactatgagtgtggactgatccagtgcttccggagctccagggaaggggctccctggtggtttcatagaatccttgcttggggtgtttctgcagagttcactggctttcctacggccaatttactattgtaagagatggtgtcagcagtacatggtgtcacgtgtcactaaaggagcattccgagccaggacacagccacttcatacttgggggaaaatgctctgggagcccagacaggagcctctctgcagtgcaagggctgggctgcaggggacgctcaaagcccacccagtacaagtttcagccccagagcaggtgcacaggaggctggggagggattcctctcgagatctgtgtcattctttaaaaaatctaaaatacatatttgacaactgaacattctataaatatcctattcaattgcgagcatttatcaaacttgatgttgtaatgagaaccacttttacactggagatttctaacccttctagatatcttaatagtatgcagctggaggttaaggaaactacttttcttttctataaataagtgaaacttttggagaaacacactcatcccccaaataatacattcatgtattaaagcctagaaatgcttatattacctctgagccatttgagtgtgggttcccagtgaagtcctgttctagggaaaattgttagccaatgggagaagctctgtcaacatagagcttagggatatggcagggctcacatggcctctaaggggattacagcttgaaccttgagcatcctccgtgtgtcatctctctgctctttctcatgcaatatcaggtatgaaataggatcactcatgaatatgcaaataactgaggtaaatatagctatctttgggccctgagagcatcacccaacaaccacacccctcctaagaagaagcccctagaccacagctccacaccatggactggacctggaggatcctcttcttggtggcagcagcaacaggtaaggggctccccagtcactgggctgagggagaaaccagcacagtcaagtgagacttcatgcactcccatctcctctccacaggtgcccactcccaggtgcagctggtgcaatctgggtctgagttgaagaagcctggggcctcagtgaaggtttcctgcaaggcttctggatacaccttcactagctatgctatgaattgggtgcgacaggcccctggacaagggcttgagtggatgggatggatcaacaccaacactgggaacccaacgtatgcccagggcttcacaggacggtttgtcttctccttggacacctctgtcagcacggcatatctgcagatctgcagcctaaaggctgaggacactgccgtgtattactgtgcgagagacacagtgtggaaacccacatcctgagagtgtcaaaaaccctgtgggaggaggcagctgtgctgagctgaggcagtgacagggacaacgtggctgcaccctttgtagggttataaacatacatatatatgcacccaacagtggagtacccagatatatcaagcaaacattattagagctaaacagagagatagacccaatacagtaaaagctggagactttaacaccccaccctcagcattggacagatcttccagacagaaaattaacaatgaaatcttagactaaatgtacatgacagaccaaatggacataatggatattgacagaacacttcatccaatggctgtagagtgcacagtcttttcctaaacatatggatcagtctcaaggatagaccatatagtagaccagaaaattagtcattttttaattgagaagatatcaagtaccttctctgatcataatggaagaaaactaaattaataagaggaatcttggaaaactatgcaaacacatggaaattaaacaatatgctccctaattaaacaatgtgctcccaaattgaaccacatgctccaaaatgggttaataaagacataaaaaattttaaaatttattgaaagaaatgataaagaagacaaagcatatgaaaacctatgaaatacagtgaaagcagtattaagaggaaagtttatagctataagcacttactttaaaaaagtagacaaccataaaataaacatcctaggaatgtcttttaaaaaatagaaaagcaagagcaaatcaaacccaaacacagtaaaaaaaaaaaaaggaaagatcaaaacgttaatacataaaattgaaataaagaaaacaatacaaaagatggatcaaatgaaaagctgttttttaaaaagataaaagacatctacaaacctttaaccagactaagaaaaaaagaaagaagaccaaagtaaatgaaatcagagagaaaaatggaaatattacaaccaatggtgcagaaaatcaaagaatcattagaggctagcaggaacaactaaatgccaataaattgaaatatctggaagaaatggatagatttagagacacatacaactttgattgaacgaggaagaaattgaaaacctgaacagatcagtaacaagtagtgagaatgaagccgtaataaaaggtctcccagcaaataaaatctcgggacttgatgacttcattgctcaattatgacaaatatttaaagaagagataatacctaaccccactcaaaatattccaaaaacagataaagaggggaggaattcttccaaatctcctgtacgaggccagcattacccttatacaaaaaccagacaaagacacacctaaaaaaaaagaaaactataggtcaatatcactgatgaatatggacgcaaaactcctcaaggaaatcttagcaaaccaaattcaataacataacaaaagaaccattcatcatgaccaagtgcagtttatcccagggatgcaaggatggttcaacctatgcaaatcaatcaatgtgacacatcatgtcaacagaatgaagggcagaagacataagatcaggccttaccttgttctcctcactcaaagtctaccatcagtgctttagtcctcttggtcagtcctgctgtacttggtctcccatgattctgttcccaggtcctgaaacactgggctcctgcacacctggagtctctctcctctttgaacatggagatcctgtatgctcagagaggggtgatgactcatgtggctcccatgccccatgcaaacaattcttccaaaacagttgtgacttttcctgttggaaattgaaaggggatgtgggaatctatgtgtgtgtgtgtgtgtgtgtgtgtgtgtgtgtgtgtgtgtgtttcctcaggcctgttgagaatgcagcagggctctatgtataacaggaaagcaatgtttctccataccatctattttcttataaagtgttcataggtaatcaaaaggaaattaatcacagtttataagatgttgtggactggagtgatgttgtcactcaaggctactatgggggctccaggaaaagaaatctagaaaaggataagactgtgagcaaagaagcaaaacctggggagcaacagggagggatgagcaggggtgactcaaccgggaagggattaaaccacataccacagagagtgaaaacgctgtgctcagcaaagaggagaacttactcagcatttcccccaatcctccctccagaagcgtgactgccaggaaagttcacaatgtatcatctccagctgggaacccgaaagaagcaggaggactgtagaccacaggtcctgggcaccatgtgtttccccagttcctactcctattcttccctctctgtccagcaaacctgcttgtttctgtcacctgccttcctgcccttggggtgagaatggatgccttgaacactcagcagagggatgctctttcagaggaggaatgacttcgtgtcatctgacgcctgagcaggaaaatcacccctgagaagaggctccgagacagagggtcgccatggttcctgccccttacatgtgcggggctcctggcacatgcacacttctcctcaaactctgtttaggagaacaatgctgggtgttgtcagcctctctcctccctagatactgctctgtcatcagcctgagcacaatttccccatgaaaggcgttaatctttctctcaattagatcaactttttacatgtctttgatggatgacagcttttcagtgtgaaattctagaaataagaaatggggtgatggggacagtgagctctgtgtgtgactcaccaggatgttccctcttattccaggtgtactgtcccaggtgcagctgcaggagtcaggtccaggacccatgaggccctcagacactgccctccacctgtgctgtgtctggattctttttttttaccggtggatattatttgagctgaatccaccatcccctgggcaacagattagaatggctggggcacagctaccaggaatacacatcatgatcaccaagatcaccaagatcatcatcaagatcaccaaggaatacacatcatgcaccctctacccaggtctgcatctccatcaacaatgactcaaccaagagccagttctctgtgaggctcagctccatggctgcctaggacatggctgagtattactgtgaaagactcagtgaggaggtgtccttgtgagccctgacacaaaacttgctctcagggcactgaggaccgccagcaagactcaggaccgtgagggggactcaagaccaccaggggaagagcaggttgcaggaagcacagggccagccccagagcaggtgtgggtggagatgagaggctggtttactgccagggtgtggggctgcctctacatctacatgtttcctccagggaccctcccttatttcatgatgctgtgcctagctctacgtctctgaaataccacagttttgttgtaccaggaggaaaccttctcacaggcactaaatgcggaacaatccctctgccagtggtcaccagggtcacagccctgtggaagctgaggggaacccagtgagtcttctccagtcacactcaggacagggaccttagtggggttccctgaagaaagcagtatttaggaattctaacctcagccaagagagaggctgggccagggtcagtgtcaggtagaacctcacaggatttacgtctgacccttctcctgacactaaagtatgcaaatctgtatcagcactgatctggggccccttttgctcgtagcccattctatttcttgttagttgtgtttgttgttgattttcctttcgctgttcctgatccctgtaaagtggagatgtggttcttgctgtaaaaattccagggctcaagccctttccctgcagctcaggtggggctcagactgtggctcctgcagccacgtgggagaggctgacgggactatcttctctcccgttgctcagaaccctccagtgtgttgtgtggagactcacctgggaatgcaagtgaccaatagttgtgaaggggatgagcttgtgtggtcaaaatgggatgtggatgtggaatttatcctgtgttgtgcaaactaacacaggttcaccttcctcacctgtagtgttagaaagagagtgggaaagttgtcagaatcaaaatggagccacttgtgttaacaccctgacaaatgaaactaggaatgaccatgaaggagggttcttaagcccatattcttgataacaagaactatcataaatagactctgcttaaccacaatcttgggaagaagacaccacaatcttataaagaattacttttgcaaggacatcatcccagacactgccagttcaaccttacactgatgccacccttgatattgattctacaactacaggatcgttctctcaaaacaacttttgtaacccatcccattttcacttcataaacctatgaactgatatcctggattactgctgcgtttgttgataacgttaaataataaggccttttgacaatgtttgaagctgcttttctctgatgtctcttctaaaataaagaatttccaagttaatgacaataaaaagataattaggaagatttggtgggaaggcatctttaacatcctgttgaatgcttctgcatagcacatgagtcccctaaaatactttgctgtatctgcatttaatgaatcagagtctaatattgaagatgtaattgaaaatacatgggcttttgatgaatcaagtcatacggtgataatgtttgtgtccttgagaaagcagaccctgtgttgtaagttttagcagatttaccttcggcaaaaaagctcatgtgtttctgaatgttatgcgacttttaacttaacgatgcaacatatgattcagttttatttagaactttccagaagatttttggcagtaaggacagtgcagcatttgagtaacactaaggagctaaaaagagttattttgtaattgctcctgtgaggtatgcacatcgctcactcagtattgaaattcaaatgccacagatgggaaaatcagaataaggaaaattttatgaactggcatggctgtagtttttgtcaagcaagtaattcatgtctgcaagaaaatacatacaacaataaaacacattcaagtccagggggaggctgacctctgccctctatattacaagtacaaggtggtatcacatccaaattatttttcagactccagggtataaagcgcttttggacggtgaagctaacagctctcccctcaggtgtggctgaggtatgtggagaatgcagagttgtgttcatgaagaagattacattattgtgtctggagacagctccccagggtgtgtctcagatgtcagacatgcgtctataagtcaagcaaagagaacacattgagtccaaaaatcagcatattcttacaggcacccattgctccatcacatgggtgagaaatttttgagacaagtgaagtgtgagttcacagtaagtgatgcagttatcatatttccatgaactttcattaacaaggcaaggacttctctagatcactcatacacaaatatacaaaatgtatttttgcatttgcgagtgtctagagaaaaaagaatctgttgagaaaacttcttcaggttacagagatctgtttaagttggagatctcacaggagtgtgtctttgagtgaatactggcctattaattaaataggtcaaaattccctctgttggagtagccttccgattatgtagatttctttattgcttcctgagttgtgaaacataaacccaagcattgacttactggaatttgactgctgtgttgataaaatttctgatatggtttcttccaatgatttaagaatagctttcccctttctttactccaggaaatgaattttcacaaggtctcaggacaccatatttcaggtgctttagttaaagagactgacttcttgggggcaggcctctttcttctaacaatgagctcacttcttctgcaaagcattcagtctgtggctctattgccatgaatcatgaagattttacactccaatgcactaaaaataatgcctcttcaattaaatttccattggcattgacatgaattggccactcttggatgtgtgtcctatgttatgagcccaacatgtcagcggactgagaatcctctgttagctacttctgtgtgtagcactgagcagactaacaatcctcagagtcatccatgaagggagtcctgaggttcctggggttcttggagacattcaggtgagttgagaggagaaacaggattgtgggctgccagccatttcaacaacaatgggagtcattaccatctaagtgtaaagtctacatcattcaaaatatcctccatgacaggctgataagaagaaatccaaccacacaatggctccatggcagctctttagtatatttgggagtgaggcttttttagggaagaaatgtccactccagtgtgtccctgatgctgctctcagctaatgtaaacagtgaactggaaccaagattctctgagatcaatgtgaggattaatgctgctccaatgtgtttaaacaagcatgtggcaatttagacgagcctggctgtgtggtttgttatatgtaaatctgaactaaataaacagaaagggcatgtctgaactagtgtgagggtgagagagctcatagaccccaaactcgtttttatttcctcctggaacctccaggtcctttggtacctccaggtactttgtccatgcatcacaggcctgagggccctgggcaggaggtcaggaagagaggatgaccagacagctggggaaaccgggatgaacaaagccagtttccttcctggtgaggaggggcaggtcgaagcctcgtgtccctgtagggatgaagcacactcacctgcccactgctacctgccaatcaggtgacctgcagagcagcagctcctgagtcactgatggtgacttcctcctcctccaaaccctctaggatctgtgcttctcagagtaggaaccccagcaggtccccaagttttcaatggattcacctagctagtgtctctcctcagccccatccccaggctcctgccctggtgctgtgtacagtgtcacaacaggagtgacagtaacagctggtgcctgcactttccaggccaagaagtttgaaagaagcaagtcacagggccagccgggatatggggtaatcacacaaatttccttcttgggggaagtgctgggaaacatccttgagtcctcctcagctcacatgcggctgctgctgttcatcccagtgtgggggacacatgagccctccccatgcccaggatggagctgtttcaatcacagcaggatgggaatgtgtcttctctatgggggcttttggagcacagctctcctgttcctgagatttgagatttataaagacaagtcccacagagtggacctgcacaaataagacagtacaggatcctcaggagagacatcccataagagaagggacaggcaggtcccatcacagacgctcatcctcagaaaccctgaccagctactcaccttcacaggtccccagttcctgatcagtgcctgtgtctgctcctgagaagagatgaaaattcaagacaaatacttctcatgatcataggcttaaaaattctcaacgtaggaaatcaaatccagtagtttatcaaaaagttaacacactgcaatcaagtaggcttcattctgcaaatgcaaggctgctttaactgctttccacagtgcttggactaattcacattccatccagcactgtacaagtgctttaacctgtgcaaagcaataaatgtgatgctctactaaacagaatcaaaagcaaaaaccatgtgagtattccagcagatgcaggaaaaaagctttcaatagaatctaacaacgcttcatgataaaaatcctcaaaattatagacattgaaggagcacacctcaatctgatgagccgtctatgacaaacccatggccaacatcatactgaatgggcaaacactggaagcattttccttaagaacagaaacaagacaaggatgcccgctctcaccacttctattcagcctagtactggaagtattcaccagatcaggcaagagaaagaaataaaaggcatccaaataaaagaaaaagaagaatgcaaaccctctgttttcactgataatatgattctatatgtagaaaatattgaaggctctgccaaaagtctcctagtattgatacattcgtttaggaatgtttcaggatataaaatcaatgtacgaaaatcacagtaacctttctagtcaccaacaacgttctggctgagagtggaatcaagaacatgctctcccaatagccatcaagacagtggaatacctaggaatagagttaagccaatgagatgaaatatctctactagaaaaacagcaaaacacatgtgaaaaaaatcagagataaaacaaataaatggaaaaataaacattccatgcttatgaatttaaacaataaataatatatgaaaaagttttaaaatttgtgattaattctacgtagcaatgccatttttttcaacatttacagaatattgttgctggtaatagcagtttagcatttgagtaatggaaacaccttacagaatcactttataacagttgcttcctgtagtgggtgtgcttcagttacctgatgaaaacatcggcatgtcacaggtcgaaaacataaaatatgtctatcaactgagaaggttgtaggcttttgtcaagtaattacttcaagtcattcagaaaaacagcagacagtaaacgaaacttgttcaaattccatggagagtcaaagctgaagaaaatccaactaaaagtgtccaaaggcccccaaggctcagttcctcggcaagtcccaccttcacaggttttccagaattttgtttttaactgatttacactgagtgaagtagattaccaggagttttccattattttaacataaaatcgggggctaagtgttgttattttataaagacatctttgaatctctcaggaaatttacctcctgagggttcagataagatcctactctaggttaagattacatgtttggcgcaatgaactggtacaaatcttactttagctttcatgttatctatttttccgcactgacttccacctttttattagtcaagtatatgggatggaagagtgcttctaagaggtccttaacttgcccatttcaatggattttcaagaagacatgagaaaccacttcgtttgcaaagcatcccaaagccatgtcctgctccagaaacgtgatctcatttcctggtcgtttcttaactgacacgctctaatcagtgcatctgggccaatttgaaatgaggtgaagaaatgtgtcctaaagtaaagctaacattgtaataggaattcgtgtttaaaaacatttagttttattattgggcaggatccatcaacatataacagttgaagtttctcaacaggagtttaataaatataaggaatgtacagaagtgtttcctaatttagataaaatgtagtgattacctaggctgtgagtgaaatcttggtaatctgctatgtccatgcccatcactctgtgcacctcaaactaattttgacctcagcagaaacgaggttaattttcaaattagtaatttttttccaatttaatttatttagatgattatgaatgactattttagcagaaagagaatcaaggaaacttgaactaaataaccagaatttaaaatgacaaacaattcaacaagatgccaggatgtgagtggctccaggcccaattagttcaaaactttgtgtgcccaggttctgtattttcctaaaattgcacatctccagtccagcttcatgccacagtcgactcccaccgtgtaagacatggcgacagcattcccaaaggtcgtgtgcaattctgaaaatggaataagcaaggtgaggagatgatagtttatattctcctctgaggaggaagaattgcctcaacagaccacttctcctgcatctgtgactagaactatgtcacaggcacacatggagcaaaatccctcaaggggataatacggtaacattaatcagggtgatcatttttttttttttttttttttttttgagacggagtctcgctctgtcgtccaggctggagtgcagtggcgggatctcggctcactgcaagctccgcctcccgggttcacgccattctcctgcctcagcctcccaagtagctgggactacaggctcccgccactacgcccggctaattttttgtatttttagtagagacggggtttcgccgttttagccgggatggtctcgatctcctgacctcgtgatccgcccgcctcggcctcccaaagtgctgggattacaggcgtgagccaccgcgcccggccgatcatttttaatactataaaattcatagatgacactgcattccagcctgagagacagagcaagaccctgtctctaagaaaaatagaacaaatcaatagatactgataccaacattttagataatgaaattttcataacctaattttaaatacgctcacatcattacataaatcttcccggaaatattcctagtcatgttgagtttcatcaacttttccagtgttcaaatctagaaatccaatagactcttgaggataaatcaaaatgagggcagtgaaactggtatctgttcagcacctgttaactcaggaggactcaatacaccctggcacactgctgcttctccgaatggctcacaaggattccagctctctctccatcctcctcaaacatctgaccgcacttgccctaagttcactctctgctcttagtctgtgctctgaagtcttcccagaggtgaaagtgagctgtcagatggaacttccctctcacctcagcgtggaatttactactacatttaactatcactctttccataatggttgatttcttggtctgttcattacagaccaaaggcatctgatttgaatctttatttctttgcatttgtctccatgacaattttgggaggttttaccaccagcactatgacacgatgtagtaacatgacacatttgtggttaacaacacctacaaattcagaagctcttcggttctcttcccagcaaatatagctgcttcctttctgtgtatgaacacatcctggaaacccgtacacacccacatagatatatacatggctatgacattttcttctctgtaagtgaaaattaacctcaatttcatacgaagttcatcatttccctgaaggtgaaggtaggtcgtttttcatctattctaacaaaagtctcagacaccagctggtaagtgaggagctaccctgcttctggatgttggatctgtctcttcccctttgctttaccacagaagattggccacttgtccaggtcccaagaagagagtccaggtttgtcctgataatatgactcatccaacttctgataactctactgttacacacattcatggaggtagcctattaattacataattcactaaacaaataccaaatacccacattgcaataccccatacccaagggtatgttcatgcattcaatgaaggaaaaggcttttcagagacagatagatcaggctagattggtcaatatatgggtgaaaacactggacttgaatgtatctgttttcccccatgtcacatgtgagacctgtcagacaggaccagggttccttgtgcactcagaggtgagggctcacagaattcctctctggtttccaggaaaggtaactgcagtaatcttggtaatgagaatatcctccagtgctgacctattatagagtttacatatgaaattttcactgcaattcacaatctactctttcacacagaagtgtacagaggtcaggacacatcctcagggtcacacattgagaatgatgaagatatgtcccacgagtttttcctaaggtctcagaaagaattccaggactcaaaaggtctcagagggcagctcccagtgccttagttaaaatggtggctcaggcctgtaatcccagcattttgggaggctaaggcaagtggatcacctgaggtcgggacattgagactagcttggccaacatggtgaaaccttatctctactaaaaatataaaaattagacgggggtggttgtgcgtgcctgtactcccagctactcgggaggctgaggcaggagaatcacttgaacccaggaggcggaggttgcggtgagccgagatcgggacactgcactctagcctgggcaaaggagcaaaagttcatctaaaaaatttattttaatttaaaaattttaaaaaaatggcccactccctagaacagagagattccctctaaacatgatggaggtcccgaactatacattaagtgaatcctggtgtgtctgaactcacatgattattacgttaagctgctgttccaatctacttcctcacctgggaaaagaggagccagggcatggctagttgaggccccaggaagagaactgagttctcaaagggcaaagcaagcatcctcatcccagggcgagcctaaaagactggggcctccctcatcccttttcacctctttatacaaaggcaccacctacatgcaaatcctcacttaggcacccacaggaaaccaccacacatttccttaaattcagggtccagctcacatgggaaatactttctgagagtcatggacctcctgcacaagaacatgaaacacctgtggttcttcctcctcctggtggcagctcccagatgtgagtgtctcaaggctgcagacatgggggtatgggaggtgcctctgatcccagggctcactgtgggtctctctgttcacaggggtcctgtctcaggtgcagctgcaggagtcgggcccaggactggtgaagccttcggggaccctgtccctcacctgcgctgtctctggtggctccatcagcagtagtaactggtggagttgggtccgccagcccccagggaaggggctggagtggattggggaaatctatcatagtgggagcaccaactacaacccgtccctcaagagtcgagtcaccatatcagtagacaagtccaagaaccagttctccctgaagctgagctctgtgaccgccgcggacacggccgtgtattactgtgcgagagacacagtgaggggaggtgagtgtgagcccagacacaaacctccctgcagggaggcggaggggaccggcgcaggtgctgctcagagccagcagggggcgcgcggggcccacagagcaagaggccgggtctggagcaggtgcagggagggcggggcttcctcatcagctcagtgctctccctcctcgccaggacctcagctgtccccaggcctcctctttctttattatctgtggttctgcttcctcacatcctcgctgcaggcaagaaagaagggagaaatttctctgtttaccattaaggttttaacagtcactggcacctttttttcaacaaattcccacaaggcccattttaccttcttgaaaaaatatttcaaggcttcccaccatctcttgattggcgtcatcggctgcatcgtgtcctgctcttaaattcatgtgatgaaaccccaatcccagtggctctgtatttggagagagggattttaagaaggcaaataagttaactgtggtcataaatgtgggaccctaatccagtaggactcttgtccttatgggaagtggaagacatcagaggcctctctctccacatgcacacagaggagaggccatgtggggacgcgctgcatgagaaggtggccctttgcaagcctggaagagggctctcaaaaaactaaccctttctgcacccagatcttggacgtcaagactccagaacaataagaaaattaatatttgttatttgaaactacctagtctgtggtatcttctgatggaaagccaagcagattcacagatacaattgtgttagctccgtctcctggagggagaagcagcccaccgaggctgacacatctctcagattatttttataaagaaaaatagatccaagatgaaaaccccaccacatttctgctgagtcattcacttagcaggcttctctgagatcagccctggggggctgtgttctaggtcatgtctctcactttccactatgagaatccatgtagatcatgagaaccagccagatggagtcctgatcccggcccaccttctgctgctccccaagtatcccaaagaaaaccactccagcgtcacccctgtgtcttctactctctaaaatcccactaaagctgaccttaaaccaggagatatttggggccgggctcttgttctcttcttcttagtcttccataaggtccaggtgccgagtaaagcctcagtaaagattgagcttcagttcccctaacccacatcattcccttacatccttgtcatgcatctgtcctctgtgggcactcagggcaggttacacaggaattgcctgaagctggcctcaactgatgtgctgagaccacgggtcatgcacatgtatgattccaggtcatgcaggctctactgcaggacagacctgtgtcctgtggggcacagacacctgctgaccccgggtctcctctaataactcacacacctggtgtttgtgtgtgtccagatggccccatgagcacagcacactagggtggccaacctcacaggtggggccgtcagatggaatggacaggctggtcacccccatcatcagtgatttcccagtgaattttaaataaattaaacaaaattaacaacaaaggggaaggatgtgtacctgtctctgggaggtatacagggtcccagaactgtgctgggagtgggtgtgaaatgcccttttgtgtagaaagccctccagcatgagtgaaagctgaaggaatgatcactgtgcaggtggaggatgataggcagctggcagggtacatttcctgaagctgttcctgggtgcatgatggttggatggcccatggtgatgagggctggactcacataggaacaaggaaattatcccatgggaatggcagaaaagaaaacggagatggacacccctggagacagcttattagatttggtggaggaaaaatagaaatttattccaatgaccccagcattttcagctaaatatgagttgcattaatagacagaattatgaaaggaagggagaaggagtttatggagggaaaaaaacagaagataaattaaaattaaaaactatgcaaatctatcaattggcagataacagagtggagctgatgcagctacttccttgttctggaaacctgccagagacacttagcattcctgtaaggccggtctagtggtgatgaacttgtccactttttacttttttgggaaacttctcaaacctcctgcattattgaagaaaagctttaatccatgtaacatatttatttggaagtttcttggctttgtttttattttcagcaacttgaatagaatcgtgcacatcatgatatttcggtgaacaacaggccacctacaggacaaaggtctcattagattataatactgtattttcaccgcatttttccatgcttagatatgttcatctgtataaacatctaccatggtgattcagctgcccacagtattcactacacttacatgacatacagatttgttacctaggagcactatgctatcccacgcagcctgggtgtagcaaggtatttcatgtaggtttgtgtaaacacactctatgatccttgcacaatgacaaattgcctaaggacacattgctcagatgtattcctactgtttttcatttttttttagatggagtctcactctgtcacccaggctggagtgcagtggcacaatcttggctcactgcaacctccgcctcccaggctcaagcgattctcctgcctcagccttccgagtagctgggattacaggcatgaaccaccacgcccagctaattctttttttctattttttagtagagatgggatttcaccatgttgccctggctggtcttgaactcgtgacctacatgatccacccactttgccctcccaaagtgctgggattacaagcgtgagccactgcgcctggccagtgtatccctactgttaagccacaaatcatcgtatctcatctctctcccttttttgtccctgttaatattttcatgttgtgcgtgcattcttctcctagctcagtgaacatatttataaggtttactttgaattttctgctaggtaatcaatgtatctccttttaatttgtgtcagtttctagtgctttttttgttaaataatttggaccacttttttctgttttgtgattattgttattattattattttttactttctctgttgctttctcctcattagaagaaaaagctaccgtaatcactcttcacagaatatgcccagggaaaatgccatcacctatcaacccaggctgtcattgtggcatctcttaaaacttcataatggttgaaattttttgttgttgttgttattagtggcactcagacctacagaggattttaagttttgctcctactctaaattaggtggcattgaaattcatcctgcaggcagtctctgataaagtggaggaattgggcagttttgttatgcatatggttcataaaaataatatgagtttaaggttttctcagccaagtgctatatcctgatattttataatcacttctttgaatctctcttgggtttatcttttgaaaatttagatcagaatataaaccaggtttgaggctttttgtttggtgtaaacatctcctataggtcattgcgtgaaaaggcacagagtctatctgaggaggagaactcagggaagcctcacaacaacaggggagacaaaaccgaggtcactaaaaaaatatgaagcttctggctcctgcagcctccagacatgccccacaccctctcattgcacacaaatgaattcctttctctttcctgagtgatctttgccaagattcctctcctccactttgacactttggtatatccatgtgtgtccattctggttcagccagggacacagaaccaggaagacatcatggcttttctagagggagctggcttggggaatcaatggttggagtagaaagtgtctttgtccatgtgtcacagccctgagggacacgggaagaaggtcaggaagacaggatgaccagacggctggagcaaccagtatgaacaaagccactttctttcctggtgaagaggggcatttggaagcctggtgtccctgtaggggatgaaccacactcacctgcccactgttacttgccaacgaggtgacccgcagagcagcagatcctgagtcaccgacagtggctgcttcctcctccaaaccctccaagatctgtccttccaggagtgtgaacctcagcagatccgcacgttttcaatgggtccacttagctagtgtctgtcctcagccccatccctgggatcctgtcctggtgctgtgtacactgtcacaatagtggtgacagtgacagctggtgcctgcactttccaggccaagaagtttgaaagaagcaagtcacagggccagcctggatttggggcaaacacacaaatttcactctgtggggaagtgctgggaagcagccttgagtcctcctcagctcacgtgtggctgctgcttctcatcccaggtgggacacatgagccctccccatgcccaggatggagctgtttcagtcacagcaggatgggaatgtgtcttctctatgggggcttttgaagcacagctctcctgttcctgagatttgagatttataaagacaagtcccacagagtgaacctgcacaaataagacagtacaggatccccaggagagacatcccatatgagaagggacaggcaggtcccatcactgacgctggtcctcagaaaccctgaccagctactgaccttcccaggtcccctgttcctggaacagttcgtgtgtctgctcctgaaaagatgcccatcaagagtccccagggttctgcccccttccttgatgtgcctctgggagtggggctggctgggctgtgggtctggcgtgaccctctccacaggtcagcggctcagtgcaggctgcaccgactcggtggggctgggctgtggctgaccctcccagggggagcctggactcttcttaggggtatctgcaggatcccaggttctgggagaacagggaagccacagtgtgtgcagggccccatctccagtaaagtgtttgctgtcgctctgttgacaagggcatatccccaggcctaggggcactgtgggcgcacgaccaatgcgcgagacacagggagtaaggcacagttccctcccattactgtgaggacactagacacagtgtgtgtgtgtgtgtgtgtgtgtgtgtgtgtccattactgtggggactctaaccaccgtgtgtgtgtgtgtgtgtgtgtgtgtgtgtgtgtgtgtattaggagttttgcagtggcttctgagacccatgattttgtaggtttagaaattatctgatgagatgttcatccacaggaaccgacaagagattaggtgttctcccaaagcccctggaagctcctggactcactgtgagtgtggactgatccagtgcttccggagcgccacagaaggggctccctggtggtttcatagaatccttgcttggggtgtttctgcagagttcactggctttttcctacgaccaatttactattgcaagcgatggcgtcagcagcacatggtgtcacgtgtcactaaaggagcattctgagccaggacacagccacttcatactggggggaaaatgctctgggagcccagacaggagcctctctgcagtgcaagggctgggctgcagggggcgctcaaggcccacccagcacaggctccagccccagagcaggtgcacaggaggctgcggatggagtccccttaagatctgtgtcattcttctaaaaaaatctaaaataagtatttgacaaaaactgctgaagagtccataaatatcctattcaattgcaagaatttatcaatttacactggagatttctaaccctgctacatatcttaatagtaagcatctggaggtcaattaagcttttattttatataaataagtgcaacttttggagaaacacactcatcccccaaataacacattcatgtattaaagcctagaaatactttaaattacctctgagctattcaagtgtgggttcccagtgaagtcctgttctagggaaaattgttctccagtgggagaagctctgtcaacatacagcttagggatatggcagggcacacatggcctctaaggggattatagcttgaacccttagcatcctcctgttgggtaatccatgtgtcatctctccactctttctcatgctgtgttaggtatgaaatagcatcgctcatgaatatgcaaataactgagatgactatagatatctttgtgccctgagagcatcacccaacaaccacatccctcctcagaagcccccagagcacaacgcctcaccatggactggacctggaggatcctctttttggtggcagcagccacaggtaaggggctgccaaatcccagtgaggaggaagggatcgaggccagtcaaggggaattccatccactcctgtgtcttctctacaggtgcccactcccaggtccagcttgtgcagtctggggctgaggtgaagaagcctggggcctcagtgaaggtttcctgcaaggcttctggatacaccttcactagctatgctatgcattgggtgcgccaggcccccggacaaaggcttgagtggatgggatggatcaacgctggcaatggtaacacaaaatattcacagaagttccagggcagagtcaccattaccagggacacatccgcgagcacagcctacatggagctgagcagcctgagatctgaagacacggctgtgtattactgtgcgagagacacagtgtgaaaacccacatcctgagagtgtcagaaaccccaggggggaagcagctgtgctggcatggaggaaatgacaaagattattagattgaagactttctcagaaaatgatattaagtcattaaggaaaaggaacaatataaacatgtatttgagaaattttaattatttgagagatttttcatacaatatttattctgcaagcaaatttcagggattgaattaataaaactgatacagaacttcctctgtaggtatctgtgtaaacatcaatttctgaatcagtgttgtaaatattttggaacacacacacaaatcacattttatctctacttttatctctattattaaaaatgccaaaaaaactcattttgtgcatgtagcattttgaattcccaccatcaatgcatgatagttcttggttttccacattcatattgccatttatcattatgagaattgtgtgttttaaccattctaataggtgagtaatggtatctaatttttagttaaatgcacatttccgtaataaaaattcacatttaacaattttcatataatttttgccgagatgcctcttctcatatttggttcatttttaactgcattgttttcttttgattagttgtaagtttacttgcatattgattataaaatcatttaacaaattaaaagaattcatttaacaaatatgtgacttggaagtattttctccaagtctgcggctgtcttttactcccttatcagtatgtattgcagaaaagtgtgtgtgtgtgtgtgtgtgtgtttatacaaatttagattttaaaaatgtaaaatgttattcatccacagatcatgtctttggtattatatctgaaatctcattataaaatacagtaatatcaattactttttccatgtctctaatctcaggctacaatcatctcatgagtgtttaagcttcacctacttgattggaggactatcaacctaacatatttggaatacttctgtaaaaagatgtgttcctcttcctattatttctttatttgatcacttattaatatgtgtattggtttatggatgtctatttcatactctgaagaagatccatgctacattattcattttatttttcaaaccaccatggctttattatgtgctgggagctcattgagtttggatcctgcatccttacagctcacctcatgcttttgtttttgaacacttccctgtttcctgctattataataaattctaaactcattttctatattatctttttcatacatagaatcagccatttttctaaagattgcttgcttctgatgttaaagaatagtatttaaaaaattgtaatactgggtatgtgcattgttaatgtggtataagtacttgcaggacctctcaaccaactggcctagtaaactatgtatctaaccttctgtaatgtgattacattaaaaatgagaacacactggtctctctacccaattatgctaccacatggatctttctagccttccttccttgactgtctataacctctcactgcaaaatgaggaaccccatccaaccatatgccattttattacttagctgcacaatttcaggacacatgcatagcagtatcagaaatgtaaagctgtacccttgtaggaaacatgtttatctactagaatagagtgcttatgttcagtttctttacactttaaacttacagagtttcctcattttcaaagttccttaggtcagcaacttcattttccactttcttcagtgaagtcatttcaatgacactgtataatttgatttatttgaaattctataaaagccaaaactgtagtcaagtaaacaacaacatatagaggatattcgaggagtttagagactgggtataaaataagttaaaaagacactgtttaagaagattaaaattatttttagtgatatgcaatggttcagatatgacacaattaatttgtctaagcacatagttttgtgatggaaaatataaacctaaatatatacaattaaaaaaaatttagcagttcattaacccaaggatcaaatgcagattgtataaaattatctcattacttattttgtgagggtggagatttcatgagatgtatgcaacaaagaatgaggtaattttcctgatttgcatataagatgttgccattcactaaagacctttaattttttaaatttttttttaaatcaattttctatgtgacccaggttttttcctcttgacaagcaaataaccgacaggattattttctttccttggttgagaaatatttccccaaacttcagctcagttcaggcatacactgtccctgaatgggcatttaccctcagatgggtacacacatctgtcaacatgtggactcttctgtcagacaaacgcacctttactcacgtggattcttctctcagacaaacacacatgtccccacgtggactctttcctcagactaccacatatgttcttacatttactctttcctcagaaaacagacatttcctcatgtggactcttgtctcagacaagcaaacatgtctccatgtgaactcttcactcacataagtacacatatgtccacatttactgtttccttacacaagtacatatatccaatgtcgaattgttctgtggcaaaatgatctcaagataatgataatcataaaccccctccctgacaaggcgtagatctgtatttttttcattgtaacctaactttgccttattgtcaagaacagtagtttgcagctctaaatataccaattagagacaggtgtccattttctctggaaacgtatttttatgttcttactggacatatttgttgataatgtttgctattatgaagataccccaacagtgtccacattagagaataaaaaagagtaatgggcagattaactctgtgcatccagacccagaaatcctttgaccttgacttccctgaaatgtagacacagaggatggatgagcaatgctgagcagtgcacccatgaccacaaaaagaaagacgtggaaatgtgtcccctccacttctcatgaaaggcagctcatcccctgttccctcaggccctggcgaggagccaccccatgtctgtgcccttcctcagtgtccacaccgtggggtctgcattgatctggattcccttctcatccccgtcaatattagtgtccttcgtaaatcaggtccagctgtggcttctcctcacggggctgttctcagtctgttttctgtgttcacggaagtcctgtgtgaagtttactgatggagtcagagggggaaaaattttacagcccagtggtgagactctcctgcaaagcctctggtttcacctttactggttacagcatgagcttggtccagcatgcttcacaacagggataggtgtgggtgccaacagtgagtgatcaagtatgaattctcagggttactctccatgagtacaaataaattaacaatctcaagcaacacccttttaagtgcagtctgccttacaatgaccaatctgaaagccaaggacaaggtcatgtattactgtgagtgacacagtgagggaaaccctgtgtgagcccagacacaaagctcaccgcagggagacaggaggggactatgtggtagatgctgctcagaaccaccagggggcactcagaaccatcagggagggtgcacagaaccaccaggaggggctcaggacaccagggggcgctcagaaccaccagggggcactcaggaccatcagggagggtgcacagaaccaccaggaggggctcaggacaccagggggcgctcagaaccaccagggggcactcaggaccatcagggagggtgcacagaaccaccaggaggggctcaggacaccagggggcgctcagaaccaccagggggcactcaggaccatcagggagggtgcacagaaccaccaggaggggctcaggacaccagggggcgctcagaaccaccagggggcactcaggaccatcagggagggtgcacagaaccaccaggaggggctcaggacaccagggggcgctcagaaccaccagggggcactcaggaccatcagggagggtgcacagaaccaccaggaggggctcaggacaccagggggtgctcagaacactaggaggtgctatgaatcactagggggcgctcaggactcaagggagcactcagaaccaccagggatagctcaggacaccagggggcactcagaaccgccagggggcactcaggaccatcagggagggtgcacagaaccaccaggaggggctcaggacaccagggggcgctcagaaccaccagggggcactcaggaccatcagggagggtgcacagaaccaccaggaggggctcaggacaccagggggtgctcagaacactaggaggtgctatgaatcactagggggcgctcaggactcaagggagcactcagaaccaccagggatagctcaggacaccagggggcactcaggaccatcagggagggtgcacagaaccaccaggaggggctcaggacaccagggggcgctcagaaccaccagggggcactcaggaccatcagggagggtgcacagaaccaccaggaggcactcaggacaccagggggtgctcagaaccaccaggaggtgctcaggacaccagggggcgctcagaacactaggaggtgctatgaatcactagggggcgctcaggacacaagggagcactcagaaccaccagggatagctcaggataccagggggcactcggaaccgccagggggcgctcaggacactagggggcgctcagaaccaccagggggtgctcaggacaccaggaggcactcagaaccgccagggggcgctcaggacactagggggcgctcagaaccgccagggggcgctcagaagaagcagggggtgctcagaacaccagagggtgctcagaagcaccagggggcgctcaggacaccaaggggcactcatgagactgtggcaagggggtgctgagaaccacaggatgtgaccaagacaccagggggcactcagaactgccagggggtgctcaggacaccagaggattctcagaaccaccaggggatgctcaggaaactagcgggtgctcagaaccaccggaggacactcagaaaaccaggggatgctcaggaaccaccagggggcgctcacgacaccagcgggcagtcagaaccaccagggcatgctcagaaccaccagggggcgctcaggacaccaggggatgctcaggacactaggggcgctcaggaaccaccagggggcgctcacgacaccagtgggcagtcagaaccaccagggcatgctcaggaccaccagggggcgctcaggacaccaggggatgctcaggacaccaggggtcgctcaggaaccaccaggggatgctcaggacactagggggcgctcaggaaccaccaggggtcacccaggacaccaggggtcgctcaggaaaccagagggtgcccaggaaaccaggggaggttcaggaaccaccagggggcactgaggacaccaaggggtgctcagaaccaccagggggcgctcaggacactagtaggcactgaggaaccaccagggggggctcaggacaccagaggtcgctcagaaaaccagggggtgctcagaaccaccagggggcactcaggaaccaccagtgggtgttcaggacagcaagaatggctcaggacaccagggagcactcaggacctccaaggggctctttggaggcagctccatatcaggtacctggggaggatgaggtttccttttccaccttggtgattcctgacctggtcaagcaaaagtcttccccaggatctcttacgatgtcttccttgtaactcatggtttctttcacctataaaacattaacttagaacaggggttcaattcaacttttaactctgcctattttcagagttatactagcaatgatatatctcagtatattttttttaattgtgtatattcaatccaaagtctggctctatgcacaatttttttgttttctgtgctgtcagacacactattgtaaatgcttttctaacaactcagcatatgcatggggtccagtttcttttcctttcatcggctgtttgtgcagatgaaacaccactttaagggctcctgtcctccactttggcccctggtgttctgcttctcaaactttctccatcttctctttttctgtcaaaatattttatcttcctcagtctccatgcaggaaacaggaagtccttttacttcctgtcctccatgtctggtaaatcagttcacttcttttcatgatcactgaagccaaccaagtttaggagagtaacagttctccttagaatacactctacctgcagaccctctgccctcatcacacttttctagggtcctgcagacataacccccacccattcctctttttccctaagtaccacagactaggctctgcaacttatgctaccctctgtgtgctcagcccaggggctcagtagtgctttcatgaagtccaaatccctaatgtgtttgcccagtctcagaccaccctccagcaagctgccattgtgattgaatcctgcaaagcatgggctgctttcagtttcctattgctggatgttctttattataaaggcatattggcaaataacgactagagtttgtattgaaaattaacgccaaaaagttttttaaaaaatttttcaaatagaaaagttctatcctgcctagtttaaaaaaatacaatgttactttaatcaatgatttaataaaaatttaagtgatgtttgtcttattagttattcaatttattaataactgactgatatttaaaaagtaaatactggctgggcgcagtggctcacgcctgtaatctcagcactttgggagggtgaggtgggtggatcacctgaggtcgggaattcgagaccagcctgaccaacatggagaaaccccctctctactaaaaatacaaaattagctgggcgtggcggggaagctgaggcaggagaatcgcttgaacctgggaggcggaggttgcggtgagccgagaacacgccattgcactccagcctgggcgacaagaccaaaactctgtctcaaaaaaaaaaaaaagtaaataccattgtacacttaagtaatatatttggcaagaatggcatttacattcattcaaaaatgaaactgcaaatacgagttacattcaattaaataattaaaataatatagaaaaaaatgggtgtgttgttttggtgtttaatatacattcatttttgcatggacgggtatatgtgtcattgctgggctgttgtgtatgtgtgcgtgtgtgtgtgtgtctgtgtgtacaactatgaagtttaaaatatattattaaattacgtagttatattaatccaaatttatcatgttaaaatattaggaaaaaaacaccagtagagaaattacagagaacatcagcaatgcctacagcatttacaagagtcacattaataacaaacaaactagttcaaatgtttagatatgacacatgcagtagaaaacgttcacatggtattaacacaaaaatggtgcacaactgaggaaattataatacgttcatgatattggctacataaatgcttatgatagtaatgcttttcatccatcaaatgcttatgataatgcttttcatccatcatattatagatgataaaacaactctataaacacttccatcactagcgtttaatatgagatgcctcacatctttttctgaaataaataaacatctgtccaccacttcgatgatcatttcaggattatcctctgaaataattatccataataattttagtaacaattttattattttcagaagcctattttataaggtctttgaactattatttttatgattgttactttatattttacacactttttatttggaataattataggttatcagaacaattgtaaggaaaatacagtgtgttcacatccatctccaagttttcactaaagttaatatgtcaaaaaaaacatgggacatgggactaatatatttacattgataagtttctgtttattcagctctgggatttatttgaattttgccaatttttaacagtttccttttttcctttttcttttctttttgagataaggtctcactttcctattgctttttgtttgtttctttgttcaacccaggtaaccacatcaaattcagtcaccatgttcctctcatatcttctggttaatcacagtttgggttcctgctgtcttcccattgaatattctataaatgaaactagtcaaataagttgattctggtcacttatatatttacctattttatcacgtttgttttgtcaatcacagtaagtgtcgaattcgctatctgttatagatgttagcctattttctatcccagatccattggttaaatctttggtgatgccttttagaaaactgatccctttaccctatgtaatatgccccttgattcctgaaagtcttatgtctaccttgtctgaatttaacatagctaagcacgctttcttttcattcatattttcatagtccatgttttcctgtatttaacttttctatgtagagcaaatttctgtacagagctagtagttgggtcttgctttttaaatcaactataataaattctattttaaaactggtattactatttttctgttaatttctattttaatttggcattttatgatcatgtttatttctctattaacttattgtttagctcatcttttatgaatattgtattggccctaagatatacaataagaattgtgtataatcagattctaattcaaataacgtaaaacctcttcataggttgtagagctattataacttattcttctaaaccctctttctcatccgttgtcttagtttattctcagtttgcacttatatgtgctataaaatataatatgtgcatttttatcattacatagacatatattagaacaattaaaaatataaaaactacatttcaacttcattttttcattcttgaccacattttttatttggatagattcatgtttcggatgtatatcatatggctactcaccctggcggaaaatttgccaaagcacctactgaaggatgaatgcactagcaataaattttctcagaatcgatttgtcttacagggtattcatttgactttcgctttaaatgaaatttttaatatatatagaattccagtttgactttaatttgtaatttattttcttgtactcatgtattcattattttcttcctgaagatggtaacacattccattctgctgggccttcattatagatatttgtgtgtatctattcagggctatatttgcaatttatggatgccacaattatcagagttgaagtcagcttctgctgtccacagagatttcaagttcctcccatgatacttgcttttgtgtccctgtttgatcctgggtctttatatttagttttccccagggaggctgtctgtttcagctgtggaaagtgcaccctactgacagtttaaattgatgactgtgtggtgaaggaggttggacaaagcgggacttcctccaaccttctgactgagtctccttcttatgcaggagtagtaagcatagttctggggagtggccttccacattgtcctgtccttaactctttccccagggctggaacgtcttttcccagacacaactgtttttcaccagtgtccccagctttttacccactatccttaccctaaagagtaaggatttctttcctgaggaaagagataggaggtgtttctggatcaagtttccttggtgtcgtctgtttccttttgtttctgttgacttcaccacagctcatatgacacatgctttggtggatttcccctggaggtagtggaggtgcattcaggcattccacaggagctgctgttcttttccccagtcaacaccacaagacaccagatgaggaagttgtccgtggatttttcaagttctctaggaaaagcttgcaagcactaggccaatctaacaccattagtacatgcatactaaaaaaaaaaaagtcattaagtatttctaggttagtctgtttctatctcaaatgccatccagtggcacctgccctatgtacactagcaggtaggtcctggttctctctgcaggctcctatcttctcagatttcagttttcttgtttgcttggtgaaatcaactcagatatgttgaatgttttttctctcttttatttgtagctgttcagcttcgttgttaatgaggtcagaataaaatcacagttttctcatttttttcacattcccacactgaatagctgctttccgtataaaagccagaaactgagagaacacattgaatatccattacaggtgaatgttaaacaatttgagatatgtttgtgtactggaataaaatgctgcattacaatcaagtcatcactcattcacataaaacatggccacattctcaaataatgtagggacctgagtgcccctccatctactggcctctcctggggccctagcctggccacaccttcttgcagggcagtcttggacgccctgggatcccgcaccaaaatttctgccctggcagaacatgcctgactggtggagagctccaatcgggcagccctcatgtgcacacaccagcttacacacttcctccgaatactgtaggttcacccaggcccacgtaacttcccacatcactttgcagtcacatgtctgtataggtgggttttgcttttcttgtcccaccattgcgtggagtgcagtcccctccccccaccccaaccaccatggcagaggaagctttggtggggaaaaagccagggccgctcctgtcagcgtcccgcacttgcgctaattctgcacagagaatagcagatcatctcacacattcagaaatcactcctgcttgtggggcatgaatacggcacccgggcctgtgcccacaagtgtcccatccctgagccaacacctcctccagtgtgaccttgaacacagtcaccaacagggccccacacacccacagacgcaatgcctctgccactgtggcgaacacctgcagggaggcaggcacccagacacccactagcactctgccacagctgccacacctccaacagcccaggacagtggattcctaaccttaaggagccggagaaccaagtcagggactagtataacttcccccagagtcagagcacacagtctaggtgttgggagctgagcactggccacctaaatttttccagaaatgaagccagttggctgaatccaccttataccacaatcaaaccctcaaggtcatccaatagggtaaaagaaaataaaaatgtatccaaaggtcagcaacttcaaagattgaaggtggataagcccacaaagatgagaaagaaccagtgcaaaagtcctgaaaacaaaaagggcgccctctttcctccaaacaaccacagcacctcttcaacagcagttctgaatggggctgagatggctgaaatgacagaaacagaactcagaatatggagagtgaaaatgtagatgaatacagctatttatggagaatactataaatgttcctcaaaaaataaagaaacaaaatctactgtagaatccagcagtctcactgctggctatgtatccaaaggaaatgaaatcaacatgtcaaagagatatctgcactccatgttcacgttcattgcagcattatttaaaatagtaaagatatggaaacatcctaaattcccatgaatggatgaatgaataaagaaaatgcatacagacacaacagagtaatgttcatccttaaataagaaggaaaccctgcctctgtgacagcatgcatgaatctagaggaccttatgccaagtgaaacaagccaggaacagaggaagagtcattcatgatttcactgtatatattaaagcagtagacttgcagaggtagagtagaatgttggttaccagggcctagaggggtggactgggaaagggagatgtgggttaaagtgcacaacgttccagttagacaggaggtataagttatgcctttctaatgcacagcatgtcaactatagctgataaggtagtatatatttcaaaattactaaaaaaataaacattagaatttccccactaagaaatgataaatttgtgaggtgatgaatataagcggcttgagttacccagttcataatgtatacatgtatcataactaaacaacatatgtcataaatatatgcaaaaattatttgtaatttataataaaataagtttcatatttaaataattacattaagaaaatgaacagaaactttcagatttcaagaatattttatatatatatatatatatcttaaaacaaacttgcaacagaatatagaaataagttttacgactcaatggaaaagaacagaattcaataaaaactggctaaaagaaacaacagctgcatcattatagaaaattctggaataatcagccatataaagattctcactctcttagaactagaattccgtaggacttgtaattcctcctgacctgggtgggaggcaaaaggaagaacagctaatggtgattcagtgagttttatacctgtgtgtacttctgggctcactcagcagaaagaaaagaagaaaagaaagaaagagagaaagaaagaaacagaaagaaagaaagaaagaaagaaagaaagaaagaaagaaagaaagaaagaaagagaaagaaagaagaaggaagaaggaaggaaagaaaagaaagaaagaaagagagagagggagagagggaaggaagggacagcagaagtcattgtggtgtgtgtgaaaacacaatccttgggctcccccacatccatctctactccagtcccatcaatgtccagcaaatacattttctaagatgaagtattttaaactttctaaatcctgctagaaaacccctcagctctttcagttttgctctatcacttgaattattgaattaaatctagtttttgtgggcctatcaataccataagccaaaataacacatgaagaaattgcactgagacacatgaaaaccttctgaaagctccataatttcagatctgcattcttatttccccgaacctaaatcactgaatagagactcagaacgagttgatcttgttcctgaacgtgcacagagccaaggacatcctgtctgtctggaacagctcaggtttgttcctgtttctcctagaggatataaaatcttgagttagggaaaaacagccagggacaccctgggctttgttcttctctcccctggaggcaggatgtccttcagagctttgtcccagtgggtaacacagctgctgaggtgtacaacccacgtggcctcgttttggtcacttttgcatggtgagcctgctttgcaccatggcctacaatatgcgtgtgtaactaatctgtctccatcttcaaaatgacattattccacatcaaatctagtgcaggtgcctcacacagaacattctcaattacctccatcattcataaaattgatgccattaatttcaagtatacatacatcagactcatttaacgtattgttattctcattgtttgaaacataacttttagatcaaataattaacaataataaaaatataaattttgaagtcaggtaatgtgatttctctagttgtgttctctttgctcagaatggcttgggctgttctgcatcttttgtttttccacatatattttaggattttttaaaaatttctgtgaagaatatcattgttgttttcatagggattgtactgagtctgtagattgctttaagtattatggacattttaacaatattgaatctttgaattcataaacatggaatattgttccatcttgtgtcctctttatttcctcaatgttttatagatttattgtagtttttttttactttgttcattacacattgtatgcctgtaccaaaacatcacatatacccaacaaatagaaatatatatactattatgtgcttataacaattaaaaattatgtatgtatattgaatctattcaaaatcagaaactatttctttttactgtttgtaaggtcttgtctctaggctataaaaagaatttgtaaaactcaacagaaagcataatataaacagaattctaaaatgagtgaaaatctgaacaaacacctcaccaagaaaaaatgttatctgaaaataagaatatataaaattgttcagtatcaattgtcataaactgatactcatatttaccaaatacaaaagtaaacatgatgtatttcaacagaattgattctcaaatatttgtatactcatacagtggaatactatcagtcataaaaactatgggttattaattcagaagacaacattttaacattttttctaagtgaaggaagatggacaaaagagactaagtattgtacaattccattcatgagacctgctaaatacagtaaaattaaaaggattttaaaaacaggtttgtgataggcagggcttttggggaaagacaagagactgacttggcaaagctcaggggatatttttagggtaaaacaaactgtgtgccattgtgatatgcctaatttcttattatatttgttcagagttaatagtgtacgtttcaaccaactcggtgattttatattttctatttgctgatagagacatgttcatttttgtcaatcactttgctaaatgtggctgagaggctgttgaaatgaacgccgagcaaatgtattcaccaaatctacaagagcaaattatttgccaattgctgattgagtggggtctataatgtatttgagattgggtgtggggatgttattgtgtgagatcatgatgtttagaccatgacactctctggtgagggatcactcattcattgcacatttaatgaaaggcaggtaggaggagcagaaggggatgagtcacactcctgaccacagccacaggttattgaaggcagaactgatgtaatcccctaaggtagaccactgcccctccaaggtgaccttatcctagagttgacacacatcctgggacaccagagacaactccttctctcccctttctctgcacttcagctggaagcaactgtctcaccgagcaccttgtgttaaggaatgagagttcctgttccaggtgtgagggcccaggtgcatccacttgatccagcacaagagcaagaacagccttccagaaaatgacatcgcctgaggtataaccagctctcacctgctgcagcttcctctgaataaaaaggaaactgttgaaacttcctcataagtgtcctgctgtgccattccctttgtccccacatgttcagttgtgtctgtccagatgtcacttttgtgtagggagattagggttctgcttccagtaccagaacacacatgacctcttaggggacttcagggttttgctgacatatgtgatgatcttaaaagtcattagctccatttctacatcaaaaaacatctgaaccagaggagcacataggctcaggcctgtaatcccagcactttgggaagccaaggcagaggaatcacttgaggtcaggaatttgagaccagcctggtgaacatggtgaaaccccgtctctactaaaaaatatatacaaaaattagccaggcgtggtggcactagcctgtaatcccagctacttgaaaggctgaggcaggagaattgcttgaacccaggaggtggagattgaagtgagctgagatcgcaccacttcactccagcctgggcgacagagtgagcctccatctaaaaaaaaaaaaaaatttatatatatatatatatatatatataataaatatatattatatattatatatatattttatataatatatatgtatatttttatatattatacatacatatttatatattatatataatatgtatatataatatataatatgtatatttatatattatataatatgtatatttatatatattatacatatatatttttatatatatatatctccaaaccatctaaatatcaagtattttttaatccatctaagagctgaaattgctgaaaaaactactccctccaaaagctgtagagacaggcacatccacagtcacagcagagacttgctgacttggaagggaagctcctggagacacattggtgagaacatttacctggtgattatgctgaatgtctggaggacaaatgtggactagggggagggtgagcactcctagaggctgtacaccccacacttgtgtggacttgccctccagggccttcaggttctcgtggaagcaattaaaatagattccctatagccatgaactggggaggagtaatcacggagaaaagatgcacaaaaagacttttctagaaagctcatccaagggaaggtattctccaaaatcttagtttatgtgggggaaggaaatacttccaaattacagacccctcctcctcagccttcctctatcacgcaaatgataaaattagccaagaggagtcagattcaaggcggtagccctgggtgcagcatctgcagaagggaggaaagagagaaaatcagctgtatcactggagattccttgtgaaggtcactgctcaggagaagagggcaaccaaaccagggagagtcaactgtaagaacataccatgctcccctgccccacacattacctcctcaacagcatcattaatatggattaaagagggcagtgtgattgctttagatctgtttgagaaagaaagtcacatactgaggcctagggtcagggtcggcggcacttcccgtgagtaagatactacgaagaaggaaaaattaggggtccataactgtgaaaatcagccacagtgtgtgtgagaatgtttgtgtttgtgtttctgtgtgtttgagtaggagttattggaacagcggacgtggagtgagctttaatccacatccatctgcagcttcaggtattctcagatgcagtattcatctgcaagagccgaaatgagaaaagagccacctccaacccccccagagttttagcctccctttgtttccagtgatccagtgcatctagacctccaggaagtggactccctggtgattttagcgattcttctcttggagccaccctgaagaggacattgggtttccaaaggcccattcactatttcaagaggtggtgtcatcagctcatgttgtcactgaaggagcattctgagccaggtcacagtcacttcctagtgagctacagaggctgagagaaaaatgctctgtgagacccaatgggaagctccctgcagtgcaaggtctgggtggcagggagcgctagggcctcgcccagcacaggctgcagccctggagcaggtgcaagggaggctggggaggggttcctcccagggtctgatgtcttccttttctcggacaaacatgctttaataagttaaacaagactttagtaaagactattgatgtgtctttgtgtctttcagtatacagttctatttgtaggatttatctaacctaacaagtcaatgagaatcacatgtaaaaggagaaatttctaggattttcagatatcttaataggtaggagatggagaaaagggatggttttattaattcagtgcttgccaatcttaacagagacagtagtaagacatgcagaaagcaaagcccagaaaagtatgaaggtgtcaaagtgccatttaagtatgggttcacttggaggaccatgttctgcgggaacttgttttcagcagacaatctattttagcagagttctgggcatacaaggggacacacatcattaaacaaggattgggacagggacttcagcgtcccactgttgcatggcccataaattatgtgtgttctctttctcatcttggatcaagtctagagctatgaaatagtatccctcatgaatatgcaaataacctgagatttactgaagtaaatacagatctgtcctgtgccctgagagcatcacccagcaaccacatctgtcctctagagaatcccctgagagctccgttcctcaccatggactggacctggaggatcctcttcttggtggcagcagccacaggtaagaggctccctagtcccagtgatgagaaagagattgagtccagtccagggagatctcatccacttctgtgttctctccacaggagcccactcccaggtgcagctggtgcagtctggggctgaggtgaagaagcctggggcctcagtgaaggtctcctgcaaggcttctggatacaccttcaccggctactatatgcactgggtgcgacaggcccctggacaagggcttgagtggatgggatggatcaaccctaacagtggtggcacaaactatgcacagaagtttcagggctgggtcaccatgaccagggacacgtccatcagcacagcctacatggagctgagcaggctgagatctgacgacacggccgtgtattactgtgcgagagacacagtgtgaaaacccacatcctgagggtgtcagaaaccccagggaggaggcagctgtgctggggctgagaaatgaaagggattactatttttaatgttgtttacagtatgtcattaataaattgaaaaaaagtaacaatagaagtatatactctaattatatgggaactttgttttttcagttttttcatttttttttttttttttggtttgtttgtgacagagtctcactctgccacccaggctggagtgtaacggcacaatctcagctcactacaacctccacctcccaggttcaagcaattctcctgcctcggcctccagagtagttgggattacaggcacccgccaccatgcccggtgaatttttgtatttttagtagagacggggtttcaccatgttagctaggctggtctcaaactgctgatctcaggtgatctaccctcctcagcctcccaaagtcctgggattacaggcgtgagccactgcgcctggcccaattatatgggaattgtttatataattatcaccctataagcaaaattcatggaggaggaaaagctctactgaagaaagctgataccggcattcccatgaaagtatctgtgtagaagtaagtattaaaatcagttgaataggcaaggcatggtggctcacgcctataatcccagcactttgggagaccgaggcaggtggatcacaaggtaaggagttcaagatcagcctgcccaagatggtgaaaccccttctctactaaaaatacaaagaattagctgggcgtggtggtgggtgcctgtaatcgcagctattcgggaggctgaggcagagaattgcttgaacctgggaggtgaaggttgcagtgagccgagatcacgccactgcactccagcctgggcgacagagtgaaactccatctcaaaacaaaacaaaacaaaacaaaacaaaaaaacagttgaataaagtaccttagagtcatctgttcaattaacatgtttaactccaaagaaatactgaaaatattttccaaaaaggaagtgccattttacgttcctaccaacagtgaataagattttcttttctggagccttgtcagtattcactaatgctttgctgtgcagccgttgtaatattatagtaaatgagtagcagtatttaatggttgttttaaatatacatattcttaatacaaagtcttgatgaacacttttttatacattgttttatgaggtgtgtgttcagatctatgtatgccagaaatgcctggcagcgttaatttaagcacactgtaagaatgaccctatagtttatgaagaatgtatgttcagagctctgagctaagaaatccaggagctgtcaacccagaagtttattccttgtctgtgaaggacatctgaatccctggcctatcccttggaacacaggatgtccaggtgattgatgctctttgttaaatctggaggttgctaggtagagggtgctaagtgaaaatcataatataaactacatgtgttttacaaatggtagtggttttcctgtccaacacacttttcctgggccacattgtatgcaagtcctcaatacaccctaggtcttgttcatgggctccaggtctcctcttcagccttttggacatggtgccacgcctattacagtcaataggggtctagcatgacaactggtaggcccagaacaaggtcaaagaaaatcctgcaagctcttagacaacagcgtcaaggaaggggagacctgtgaggaaatcccaggcaggccatgcacatctctgtgggcccaacagctgcaatccttgatggatggggcccgctgcatgtgtacggggatgcctccaaaatgccaaaagttctggaggacctgttgcctgaggtggatgtgacaatgtgacaaagtgacagtcagattcctgagctgtggcagctgttggccactcctgactgcactctgagcaaccactgaggcagagctcattgcacaggctagggtgtgtcagccacgagaacagttgtaactataatgagatgccgcctgtagggataggatagcaaattggagactattgtttatttggtaggccatttaaagtgttgctgactgccacaccaatgcattaggactactatgactacgtcatcctgggagcctaagtcctggcgtccgatgtagagctccagtgggaaggagatgaaggttaggatgagtccataaaggttcttgctctgcagcccctgctttgctgtctcacttggtgaacagaggatgggaggtcaatgcggacaaagtccagggtccaggcttatcagtcaaatacttggtgtcatctggttacataagactatagttattccatatttcatcatagataagataagatgcaggtctactcatgtcccaccacaccaaagcagttggaaacctcccaaggcctcctgggacattggcgatcctttattccccatttcggcaaaccccttgggcccccatggcacttagacaagaaggtgccccactgcgactgttccaaaagggaggatgagggctctgaagaagctgaagtcacagtgaaatgaatacaaaccttgggagttctagtgcagggacagccctgtgaattggatgtagtcagttaccctgaggggtttaggtggggactgtgttaaaggcaaggacataagtgtgtgtccctaagaccctggtctcaaagacagaaggaagctgaagtgagatatactgtttaggagtagcaactgcactacatgtcatgccttacgagtgtaggatgtgacaaagagggccactccacatccggaacaacctttagcaggctggctaaaggatgccttccagacacaaaagccttggaatgccaggacacagtctgtagccaaatggtacttgtggtggtcaccaccaacataaaagtgggccaactgtgccagcagaagttagccccacagaactttcccccacctaagagaaggcagtgcaccacaatgcggaattccaccactgtggaattgggggagcttagaattggattcagacacaaggggagagagtggatcacagggtggcttctctatgggatagggggtggagagtattatactctctggactcaagatgagtaaaatgacacccatcacaaaccatccagccctatgatggcacctttatggtaagtggttgcaggctccaagggggccgggtccaatgaggaagatgcccccacagctcgttctcaatggcagactatagaagagttgcaggatatcttctgggagtcgagatgaggcatgctaattatgctgagaattattgaagtcccaacaatgaattgtttactgcaaaataaaagctacagttatgtattcagtgcctacccaatggcatggtgcactgatttccatgttaagccccctgggagggcagccaacatttcatgtgccccaggtagttgctgacttaggagaaaagaagaaactgagtaagcaagggatgcaccctactgtgatgaagaacaatggcaccaaaggaagagagacagccaaggagccagtcagggtggccagacaacgaatgtgctctaactggcaacacctaccagttctctgggcccatagcggcaataggtggttatggaagggccacggaagtcagaccggttgaactagtgatacgacctgggggactgccacccagaccctgtgtagtatacacagcttccatcctagaacacatgagaatggatatcttcttaggcgtgaccctccaaacaacggccagggaattccaacggagagttagagtggtgatgtgtgtgaccaagcagaaggcaaactggatgccagtagagctgccaacccatggggagtcccacagctggagcaacaccacctgccctgggaggggaagatgatccaatcatgaagattgttaaggagctagcccaggtaggcattaggaggccactgcatggttcctacaacagacctgcatggcccatgcagaggccagttgagacatggagaatgacagtagattactgggagttaaataaggtggtctcccgagtgaatgcagctgttcctaatatctcctccagtctgacgagaataggagaggtgttagccacgtagcatttccttatcagtttagtcaataccttcttcagcatttctgttgccccagagtcaagatcaatttgcattaacctaaaaagaacaatggacttttactgtcttgttccagggatatttacacagcccaaatctcacagcctagtgacctccaacctcagtcgatgggctgacccaaaggggatacatgttttccactacattggtgttatcatgataacctctgagtcttttttcagcttataaattacagcccctgtcttgctgtctcacttgctgaatagaggatgggaggttaatacagacaaaatccagggtccaggcttatcagtcaaatagttggtgtcatctggttgggtaaaactaaagtcattccatctgccatcatagataaggtgcaggcctacccacgtcccaccacaacaaagcagctgcaaactctcaaggccttctggagcatcagtgtccttttattccttttatttgacatccctgaaggaggctgctaggggagactgtgtccctcctaaattcatgtgctgaagtcccaacccttggtccttcagaatgaaatcatacttggattagtgtcctttaaagaggtgaataagttaaagtgagattcctggagtggggccctaatgcaatctgactgttgttataagaagaggaagcaggagggagggtgcacaggccccgagggacggccatgttaccacagaacagtgagaaggcgccatctgcatgccagggagcgagacctcagaggaaacccacccagctggcagcttgatcttaggctttcatcctccataagtgtgaggaaattggttttgtattgtaagccatccgatctgtggtatttcgttataaaagccctataaaatgaatacagtaggtaataggagagcttctatacattgaaaaagtcggatggccagaaaaacctagacactcctgttcagacctgagcagggtgatggacctgctttgggacaggagaggggaagagatgaacccagcacccagacccagctgagcccattcctcagcaggccgtccctgggccggagcttgcacaggtgtgaaagagcctgtcttggtcttcaggggctcatggagttggacggagaatggtgtagactcaagaacacgtcatcggtgtgcccgtgtttatgtgaatgggatgtgtttctagggtgtgctcatccccaaagaagaattaatcaggtctcttgggctagaaagaggttgtggcatttgtgtgtattaataactgtggtcggacagtaaattatgttaaactgcttatgggaaggcacaatggaaagaaacactttgttacagaaggaaaaaaaaggtgattatttaaatgaggtgcctttgaaggtcaccatgccaagaggagcccatcacatgatagtgctggctttcatgttcaggagatcaggagggtccgtccgctggcttttatgacaccctagacagagctgagagtgtaatgtatgaatggaggggaagtggagagaggggaggccaaatgtttggtgggaatggagggtcactattggagccattaggaaatacacaagcatgaattatgctggaggacagaacagtgttcctggggaatattgtgttgctttgggagctgctgaacatacaggagtttcactgttcctagttctcaaattctctagactctcttgacaacccagttttaaatattgggaatataggtaagacacattcgttattaaaaattattaagagaagatgtaggaagaaatttaaagtaatccatttggttatgaaaatttagttacagcgaactgtgatgtccgtttcttacttggaataatggaatgtaagtcattagtcatctcaacggttcatttttccataaccatcaattacaaaactgctgagtaatttcctgaattgcccaccatagaaactgacctcacatttcctcaatgagaaactgccagtcccgttgatccagcctcgttcttcccatcagggattttgtatctctgtggacgtgtggcacagtgctgcatatccatcggcatatggcctcaggaaaggcgccagcctatccatgcatgatgaagcttacttaggggatgaagcccgcatgctgggtgagccagtgccgacagctgaaagaatcaactgcctggtgtatgatgcttttatgaaaacaagcccagggcctcttgcattcttctgtattagattctctggtgaagatttttattcatttctgcctgaaattgccacatataattacctagaagcattacaataaactgatttggaagttaactgacttcctggtgaggttaaaatgagtgtcaggtgcatagtgagacagaccggagacatggatgcatagcaaacttgtgctcaccatggtttctatcttagttagggaaacttctgtaccttccttagatgttcaggcactccattgaggaccctggcataacattatttattgacagaccatagctcaaagtatagaactggatactaccaaggaggatatactattactattttatctttatcttaaaatatactcttccatctgaggtgaaaattaatccagatggtagaacttattgcagttactacagcattttagcaaatcaaaagccgcagaacaaacatatggacagatggcaggtatgttttcggaatcgtaaacaagttcgtgatgactgtaaaaccaaggggtgtctcacgagggctggaaacctctcacaatgaaacaacacaatgaggatctttgaaaagtactctgacctcctggtgagctggctgatacggaggctgagctccatgtagaaagccaaaggaatttctgcaggacgtcatcatgccaagcacagccgtaacctgggtcccagcccttttcacacgctcaatggttagatcttgggagggaatcaaagaagccatagtaaaatatcaaaatttaaaccccgattttgaatttaaaaagtgttaaaatatggttgtggcctacactcagaaaatctgtgtccttcagatggtttctcagtggcaccagatggtttcaagtggctattcattaagtttctcagtgaaattaccagacatagaataaataaattgtcactgtcttaaatcaacccatgggaaaggaaaactgtgtaaatacagcagagaggaaacattgctcaagggaaaaacaatctccagaaagtattgttaaagaaacagaggccctctttccagccagcgccgagcgatgggcacctctcgggacaactggcacaagggccgcaaagctgggggcaagagatggccctgccacaagaagcggaagtatgagttggggcgcccagctgccaacagcaagactgacccgtgccgcatccacacagtccgtgtgcgaggaggtaacaagaaatactgtgccccgaggctggacgtggggaatttctcctggggctcagaatgctgcgctggtgaaacaagggtcatcgatgttgtctacaatgcatccaataacgagctggttcgtaccaagaccgtggtgaagaattgcatcgtgctcatcgacagcacgccctaccgacagtggtacgagtcccactgtgcactgcccctgggccgcaagaagggagccaagctgactcctgaggaagaagagattttaaacaaaaaacgatctaaaaaaattcagaagaaatatgatgaaaggaagaagaatgccaaaatgagcagtctcctgggggagcagttccagcagggcaagcttcttgcgtgcatggcttcaaggccgggacagtgtggccgagcagatggctatgtgctagagggcaaagagttggagttctatcttaggaaaatcaaggcccagaaaggcaaataaatccttgttttgtcttcacccatgtaataaaggtgtttattgttttgttcccaaaaaaaaaaagaaagaaaaagaaacagaggcatcacacttactagaaaaacatattctatttcatatattatggggatatgacgtgatgttttgacgtatgcgggcattgtgaaattattaaatcaagtaaataaacatgtccatcacctcacatacttattttttatggtgtaaacgtgtaaaatctactctcttatcagttttcaagtatatagtacattagtatcatggaagtcaccatgctgtgcaatagatcttcaaacgaattccttctatctaaccaaaactctgtaccctttcaccaacgtctcagctttcacatgcccctgacgccagcccctggtaggcaccattctactctctacttctctgagttcaacatttttagattgcatgtgtaagcaagatcatggagtaattttttatacctggcttatttcactcaacataaagagtcaaatgctcaacatcactaatcatcagggaaatgcaaattaaaaccatgataagatatcacctcacacatgttacaatggcttagtctcagtctgtctttttgttactataaccgaataccagagactgggcaatttctaaagaaaaggaatttatgctttatggtgcttgagtcagagaagtctaatatcaagacactggcatctcacaagggacttctcactgcctcatctcacagcagaggtgggtgagcaagagaccatttgtccacgagagaaaggagaccatcttttattagaaattcactcctataataactaacccactccattgatagtgacagtaatccattcatgaggacagagccttcatgacttgatcacataataaaggtcccacctctcaacactgttgcattaaagattatttccagatcctaaactttgggagacacatttaaaccatagcattccattcctaatatcaaaatttatgtccttatcacaatgcaaattacattcattccatcccaattgtctccaaagtcttatccagcatcagtgcaaaagtctgaagtccaaagtctcatctaaatcagatatgagtgtgactcgaggcacaatttagcctgatataaattgtttccatctgcgagcctataaagtcaaaacaagttatctactttcaaatacagtgaacaatggggcaggtatgggatagaaattcccattccaaagctcagagagaggcaaggagaaagcggtgcctagttcaaaacccaacagggaaaaaaacattaagtcttatagctggaaaatcatcctctttaacggcatcttgtgcacactggggagggggatgggcccccaaggcctccggcagtcttgcctctatatattttctgggttcagtccactcagccgctctcacaggtgggactctcaggcctctagctctcctaggctgactggaaactctttgtggtacctccaaacccacatttctgcttggcattgtgctaagggcccagtgtggtgactctgtctctgcaacaagtcactgcccgagaccttaggctgtccttaggctgcccgagaccttaggccgtccacagcattctttgaaatctaggtggagaaagccatgccctcgtggttcttgtattctgcacacctgcagaattaacaacacatggatgccatggaagttgatgacttgtaccattaaagtgatggcttgagccacacctaggtcctcctgagccacagcatgggcagccaaggagtgctgtgcctggacaccgggaacagagtcctaaagtgcctgctagaagtgaggccatagatttccttcaaatttctcccaccatataacctcgttcatggctctgaacttccaccttacagaaggacctagggatgaacacaattcagccacgttctttgccactttatggcaaggatggcctttgctccattttccgatgagctattcttctttttctcctgagacctcatcagaacggcctttattgtccacatttctactgacatctaatggtcatcacctaaataatctctaagaagtttcagaatttcctcacagctctcttcttctgagtcctcaaaagaatcacctctagtgttctattcagggcaatccagactttttatagtctgatcctccaaattattccagtctttgtgcattactacatccacttctacattttggggtatttgttatcgcaacagccccacctcttgatactgatttttcgtcttagtccactttgtggtgcaatgagtgaataccacacactggctaaagtataaggaaaaggaatttattttctcgcagctctagaggctgggaagtcaatatcaaggtgttagcatctggcaagagccttcttgctgtgatgtccatgtggaaggcaggagagcaggtgcgaaggatggaaaggggtttaaactcattttttaatgaggaacccaggcctgtagtaactaatctgctaccacaatgagtaacctactctgacgataatggcattcattgcttcatgagggcagagccctcatgacctaatcatttcttaacattcccacctctggacactatggaatttgggattaagtttccaatacacatcctttctaaacagcaggggctttttaataggttgaccacccaaggctgcaggaggctctgaagcagtggcctgaggttggctgtcctttgtgagaatggagagaagtgaactgactcatggagacacaagtagatgaggtaaaggcattcattgcttcattacatggatggtgaggtcgattgaaggcattaacggattaaagatggtggcaaaaccgtctgaggtggagaccacggggagtccatcagaaatggaggacacgtcccaataaatggtgcttcatttccctgcaaagcagatgaaagcaaagaacaaaacacaacatcatagtgtacactgagcagtggattgagagaagagtttcctaaggcataactgacagagtggagaagacacacaaatctttgcatgatgctaacatttggactgtggcttcattatttcttattaatattttactgaaatatcgctagaaggagactgaaaatgaagtgtgaaaagttaaatgggatttctgctctatgtccttttcagatgagaggaactagggaattccagggaagaaacaataatagctgctgagcaaggcttttgcagggcaggacaaggaatccccaaagagaaaacggaaacctcagcttcactttgcatctgctcctgagccaggtcctgagcgacccctgtaggtcctgagtgcccctccgtaggttctgagcatcccttggttgctgggcgccctctggtggtgtctgagcccctctggtggtttctgagcccccccgccttatgtctgatcctccctggtggtgtccgagtgcccctgctagtgtctgagccccctggtggtgtctgagtccccttcttagtgtctgagccaccctattagtgtctgaggacccctgatggtgtctgagcccccagttagtgtctgagccaccctattagtgtctgagcccccctggtggtgtctgagcacaggagagctcctctgaaggaagggtctacatggggacaggcgtgcttgtctcagggaagggtccatgtggggacaggtgtgcttgtctgaaggaaggttccacatggagacaggtgtgcttgtctcagggaagggtccacatggggacaggtgagcttgtctgaggggacagaagtgcttgtctcaaggaagggtcctcatgtggacaggtgagctcttttgagggaagggttgacctggggacaggcatgcttgtctgaggtaagggtcctcctggggacaggtgtgcttctctcagggaagggtccacgtggggacagaggtgcttgtctaaggcaagaatccaagtagggacaggtgagctcgtctcagggaagggtccaggtggggacagttgtgctcatctgagagaagcgtcgaagtggggacaggtgtgcttgtctcaaggaagggtccatgtggggacaggtgtgctagtatcaagaaagggtccacatagggacaggtgtgcttctctcagggaagggtgcatgtggggacaggtgtgcacatcggagagaatggtccacctggggacaggtgttcttgcctcagggaagagtccaccttctcagggaagaagtgtgctcctctgagggaagggtgcacatggggacaggtgtgcttgtctcagggaagggtccatgtgggaacaggtgagctcatctgagggaagagtccacgtggggacaggtgagctcatctgagggaagggtccacatggggacaagtgacctcgtctgagggaagggtccacgtggggacaggtgagctcgtctgaaggaagggtccacttggggaccggtgtgctcctctgagggaagggtccacgtggggacaggtgtgctcctctggagggaagggtccacgtggggacaggtgagttcatctgaaggaagggtccacatggggacagttatgctcctctgagggaagggtccatgtggggacaggtgtgcttgtctcagggaaaggtccacgtggggacaggtgtgctcaccttggggaagaggacagatgagctcatctcagggaaggggccatgtggggacaggaccaagggttgggacttcagcacaagaatttaggaggaacacagtcttccctagcagcctccttcagggatgtcaaatattttccttctgttccctgtgaaagccttaaaggggtagggaaagggcgttcaacctgcacactcgtagaggggaaaccagcttcattagtaatcgttcatctgtggtaaaaaggcaggatttgaagcgatggaagatgggagtacggggcgttggaagacaaagtgccacacagcgcagccttcgaaacacaccacggtcacgttaagtttaaatggagtgaccacattcgccaggaaagggaaatatttacacttttgaagaaacagtaatttgtgtttctgattatgatctggccttggattttccctcccctcataagcaatgacagaattggcagaaatatgtgaaacgttagttctcagacatgagacacccacagagggccccctgtgcccttccctgagagctgatcagctcctgcatctgaagaaatgaccaaagaccaggagagaaccacacagaagcatcggagggacagcacctggggctctgatggggtcaggaatagcatctgttcccaatagatggactaagtaaaaagtatcataattcacaagagttttacatagcacagaagaaaaagttaccctatatcaactgttgatcttgtgaatccaggaactctggattcaaggtggtcgggcacatcttgatttacgcatttcagggacacatgagacatcagtcaatataagtaagaaggacattagttccatccagaaaggctgagacaactcaaagcaagtcctccccacttagggcttccaggtcacaggtaggtgagagacagatggttgcattcttttgagtttctgataagtgtttgcaaaggaggccatgaggatatgcacctgtctctgtgagcagagggacaactttaaatagactgggaggcagatttgtcctgagtggtttccagcttgacggggcccaagatattttcctttcacaatctggtaacttcaaacaaaacttcaaagccacaacaaaacaacacaacaacaaaaagaataagacatgggtacttattaagagtagaaaaacattcagtccccaaggaaaatattggcagtgtctacctccacatgacaaaggagtaagcagtgtgagccacagaaaggagcactattaacccacagagcaaccgagaataacacgggtgatgcaagggcattggacgcacatcattgcattttgtagattcagaaagaaacggaaaagattgacggtggtaaaagagacagccctgcttccctctcccttttccctccccgatgaggcctcacagccatgaccctcagcctcatcccgcagtgcagcagctgccgtcctgtccaggcccaccccctgccccgccctgggactgttacctcattccctcccggagtccaggtgccccccggggtgtggtgcgggagcctggggaggccctttgttctctgtcagggtctccctgggagggacgcagccaccgcagctggttggggcctggcttcgcccaggacagtcctttcctttcccattgtctttggatgactatcgctgggctgggacatgaggcgggcagaggcgcgggtcacccttaggacccccctcttgctgctggggctctgggcgctcctggctccggtccggtgttctcaaggccgtcccttgtggcactacgcctcctccgaggtggtgattcccaggaaggagacacaccatagcaaaggccttcagtttcccggctggctgtcctacagcctgtgttttggggtcaaagacacgtcattcacatgcggaggaaacaccttctttggcctagacatctgctggtgacaactcaggatgaccaaggagtcttgcagatgggtgacccctacatccctccagactgctagtacctcggctacctggaggaggtgcctctgtccatggtcaccgtcgacacgtgctatggggacctcagaggcatcatgaggctggacgaccttgcgtacgaaatcaaacccctccaggattcccgcaggtttgaacatgttgtttttcagatagtggccgagcccaacgcaacagggcccacatttagagatgatgacaatgagacagaccccctgttctctgaagcaaatgacagcatgaatcccaggatatctaattcgctgtatagttctcatagaggcaatataaaaggccacgttcaatgttccaattcatattatcgcatatatggcaatattacaacttgttccaaagaggtggtccagatgttcagtctcattgacagcattgctcaaaatattgatctgcggtactatatttatcttttgaccatatataataatcgtgacccagcccctgtgaatgaatatcgaattcagagtgcaatgtttacctattttaaaacaactttttttgatacttttcatgttcattcatccacactacttattaaatacgtgccacatgaatctaactatgaacctgaaaggtataacttctgttcccgtatagccctgttacacattggtactccaggcagacattatttattggtagccgtcataataacccagacacagatgagaagtattggtctggagtatgatgataactactgcacatgtcagagaagggcctcctgcattatgcagcgatttcctgggatgacagatgcgttcagtaactgttcttatggacatgcacaaaattgttttatacattcaggccagtgtgtttttgaaacacttgctcctgtgtataacgaaaccatgacaacggttcgctgtggaaacctcatagtggaggggagggaggaatgtgactgtggctccttcaagcagtgttatgccagttattgctgccaaagtgactgtcacttaacaccggggagcatctgccatataggagagtgctgtacaaactgcagcttctccccaccagggactctctgcagacctatccaaaatatatgtgaccttccagagtactgtcacgggaccaccgtgacatgtcccgcaaacgtttatacgcaagatggaaccccgtgcactgaagaaggctactgctatcgtgggaactgcactgatcgcaatgtgctctgcaaggcgatctttggtgtcagtgctgaggatgctcccgaggtctgctatgacataaatcttgaaagctaccgatttggacattgtattagacaacaaacatatctcagctaccaggcttgtgcaggaatagataagttttgtggaagactgcagtgtaccaatgtgacccatcttccccggctgcaggaacgtgtttcattccatcactcagtgagaggagggtttcagtgttttggactggatgaacaccatgcaacagacacgactgatgttgggcgtgtgatagatggcactccttgtgttcatggaaacttctgtaataacacccagtgcaatgtgactatcacttcactgggctacaactgccaccctcagaagtgcggtcatagaggagtctgcaacaacagaaggaactgccattgccatataggctgggatcctccactgtgcctaagaagaggtgctggtgggagtgtcaacagcgggccacctccaaaaagaacacgttccgtcaaacaaagccagcaatcagtgatgtatctgagagtggtctttggtcgtatttacgccttcataattgcactgctctttgggacagccaaaaatgtgcgaactatcaggaccaccaccgttaaggaagggacagttactaaccctgaataacactaattcagcctcccgatccctgtaaagatacagagaatataacagcaaaatctatgaaacaggatcaggggaagggatggcaaagctcaagtccacatttcttgaagtccacaggaagcacagggtcctgtttcacatcacagggaaacgggaggcattggcttctgtcccaggttcttgtaggtcgctgatgctcactctgaaataaatcttcaaaaacacattggtgccttccacattttcttagactcctctgggagcccaaacttggccagaacctcttgcctggagagacatgaatgagcatctggctcttgacctgaggtctctggtcccagaattaacggaagttgccaccagctccttacagggaacattcatgacatttctccagaagagagctccagagcaatgagcttcctcattccccaggtaatctgtccttctctaaacccgaagtcagtttagggtgatccagggctactccctgttccctgtctgttcctcacgggggtgctgtgggcttttcagtgagagggacttgggttcaaatcccccaccaagcaaatccccctacctggggccgagcttcccgtatgtgggaaaatgaatccctgaggtcgattgctgcatgcaatgaaattcaactagaaaaataggtagacgtgaggggcaagctgtctgtcatttagtgtgagctctgtgagtggcagctgccccctttcttcctgcccccacatttccttgaactgaaacaggaagggaagctgagtaagtcgtgatgaggaagagaaaccaggcttgtagcagcacaggctggtccgggtggaaaacagggctaggtgtatcactgagttattgtaaaggaaaatggaagttaaatgtataaataactgaatgagataacattttattttaacttaaaattcacactaatattgacttttaaaatgcagtgtagatatgtcagagagaatttcaaaggcaaagcccaccgacggaagaaatcacccttcccataccatccacagaaaactgttggtattctagggtagtactgagatctagcatttttctgaatacatccgtggttctagatgtcctgcttccatagatattgtttagaattcccacccctttctccaaacacagcttgatatcctttctctgaacctgttagaaatttcctccattcagctgtcataaagatgcgagcaatccattcctgtgcctctgtcagtgtgttctattattttgtgggtgaacgctaatggacagttaagtgtgaggtcagtgaatacagtgccctccctctatgtgtccttcgggtgtgaggggttttgctgatagagcagcaggccccatcccaccctttatgcatctccgccccccacctcacgctccagctgacctctcccctgtggcctggggcgttccccagggggaatgacctctcctctctccagggcccacccactcagtgcccgtgcaagaccaccacgcttggcacggccccacctcgcgtcagggcctgtgtcccctgccccaccccctaaacagatgggaaccactgggactctgctcagggcagggggcggaggtatgtgtgaaaggaaggcaaatgtgcactctgttggagaaatattataggtagtttgagcaaaaaatctaatgccatgtgaacttttagaatgatacgtattttaacaaagaacatgaccaatagagtttgtattgaagccaggaaaacactatttagagcaacagcaatatcaaaaacacaagccaacagttcaccaagaaaaaccaccattaaccccatggaaatggtcttccaagagcatcggcacttaaatcctcgaaatctgcctgcctcagcacctgttgtcctgacctgccctcctgtgtgtcctaatcactcccaaacacggggcctgcactgtgggagattcacgctgtgccaggtggagggagcaggacaactgctaacaggttgttggtgtggatgccgaggccacccaagcaggtgtaaactcccacctgtgggccagggaagagtgcacgggagacatgtcccgggcatagggtgagggagagctgtgggggctctgggttctgaagtgggttctgaagagggttctggcctggcagggataagaccaaccagcatgtgaggccaggctggagtctggacctctgaagctgcaagggtcatgggctgcttggccccaggggctgtcctggttctctatggagtactttcaaacattctttcttcttccaatccccctccttctctcccaaagcctgcatctcccaaatcctctttgtcggatcctcggcttcactctgcatccgtcctgagcatcgatcttccaattccatcctcttctcttctgctatgtctaagctgctgtgaagccacctgctgtaatttactgctttatatttaatattgtaccgtacatctgttctgtttccctcatcataaatgcttcatttcatgctcagcatctgagaacacaaggccttgtcagctgtcacctccttccgttctctgtttccttcctcctatccccatattgctcatcatgtccagtctcctgccatcctgaatgcttctgatggaaggtctgagatgtctcatgagcactgtgaagattctttgtaatgtgaccttgttccaggcaggaattctccttcacccagccctggaagccaagtataggcagatggccatgctcaatcaaagactgagctaacttaacagtggctttggttttaaggtttctccaatccccagggcacaggatttcagggaattcaggtgagagtctgggtgttacccttcaggaggctgtaaactccatttcacctagtctacaccacagactatggaaactatatatatatatagttctgtccctctagagaaacctaatatgtatatatacaatatataatacgtattatatattatatataatatatatatatattagagtttattgaggagtattaaactcacaatcacaaggtcccacagtaggccatctgcaagctgaggagcaaggaagccagtccgagtcccaaagctgaagaatttgaagtctgatgttcgacggcaggaagcatccagcacaggagaaagatgtaggctgggaggctaagccagtctagtcttttcacgtttttctgcctgctttatatcctggccacactggcagctgattagatggtgcccacctagattaagggtgggtctgcctttcccagtttactggctcaaatgttaatctcctttggcaacaccctcacagacacacccaggatcaatactttgcatgcttcaatccaatcaagttgacactcagtatcaaccatcacaagtccaccccttgtcaacttgaacccatacaaatctcctgagatcatacataatcttcaaataaagacaataataaggtcataattacacctaatgtaatacaactatcttttgtacaaccagaaatgcaccaatccccaacccaaatgctattatgtaaagttaagaacacttaaatgctgatatgaagtcaataaattttatgtcacatgataaaggaaaaaagaaatgaaggaattttcttagtacaagtgtgtacatgcacaaacatgtttttaacaaaagaagaaggaaatactgatgacaattacggtcctcatttctgcaactgatcacgtggttgtagctggtattgatgactaccttcttctactacccattctgtattccctttgccttcagcaagcatcacagcaggtagagttttttctcctagtggagtgatgcaaaccttcattcctgaagggtctgggccatttgtagtcctgcctggattgggctgttgtagtttcccgttgaccttaatgacagggcatggtaatgttaagagacgccctaatggatctcctgtattccatacatattcttccttgcctccattgtggagtaatagactgattgcatcttgatagtccaggtcaatcagcccagccaacactgtaactcccctcttagcctgtggacttaaaggtaggaggggcccaaagtggccaggtggaaatctttacttccagtttaatggaattgttgttgtttctcctgatggcagcattattcccactggaactaagacctctaggccaacagaatgtaatgtcatgggaccaggaagcaaaaattttgctagtggatcactaggggtgatggtgaatggtgccatttccacttccaccccttgattcctggatccatgaattatggctatgggagaaagagtaccatatattggatgctgatttggagcatacatggccttttggagagctttgccccagccctgcaaagtattggagcctagttgacattgtaattgtgactttgaaaggccattccattcttctatcaatccagctgcttcaggatgatggggaaaatggtaagacaagtgaatcccatgagcatgagcccactgccacacttctttagccgtaaagggagtgccttggtcagaggcaatgctatgtggaatactgtgacagtggataaggcattccatgactccacagatggtagtcttggcagaagcattgcatgcatatctgcagtaagtgtctatttcagtgaggacaaacctctgccctttccaggatggaagaggtccaatataatccaacctgccatcaggtagctcactgatcaccctgaggaatggtgtcatttgggtagagacccagagccaaaccagatcacgccacccaacccctcccaaatctcatgtcctctttgcatttcaaaaccaatcatgccttcccaacagtcccccaacatcttaactcatttcagtattaactcaaaagtccaaatccaaagtcacattggagacaaggcaagtccctttcatctatgaacctgtaaaatgaaaaacaagtcagttacttccaagacaaaatgggggtacaggcattagatacatgctcccatttcagttgggagaaatgagccagaataaaggggcttcaggtcacatgcaagcccaaactccagtggggcagtcattaaatcttaaagcttcaaaataatctcctttgactccattcctcacattcagggcatgcttatgcaaagtgggggctcctacaaccttgggaagctctcaccctgtggctttgcagctctgaccccatggctgctctcatgggctttgcagagttcagccctcctggctgctctcattgagtgcatgcagcttttccaggtgcacagtgcaagccgttaatggatctaccattctggggtctgaaagatggtggccctcttctcacagccccattagtcactgtctccagtggggactctgtgtgggggctccaaccccacatttcccttctgcactgccctagcagaggctctccatgaaggctttgcccctggcgcagacttctggctggacatccagtcatttctataaatcctctgagatctgggtggaggatcacaaagctgaactcttctcttccgcacatccctaggcccaacatcatgtagaagccaccaatgattggggctttctgaagcaatggcctgagctgtacattggacttttttagccacagctagacctggagcagctgggacacagggcaccaagtcccaaggctccaaagagaagctgggccctggacccagcccatgaaaacatttttccctgataggcctccaggcctgtgattggaagggctgctgcaaagatctccgacatgccctggaaacattttccccattgtcttgattattaatattcatctcttcattacttatgcaaatttctgcagccaacttgaatttctccctagcaaatgtgtttttctttactaccacatggccaggctgcaaattttccaaacttttatgctctgtttcccttttaaacataagttcctatttcagatcatctctctcaagggcaaagttccacagatttctagggcagggacaaaattccatcaagcttggttttatacattttagagaggcatgagacatcaatcaaatacatttaagagacacattggtttggtccagaaaggtggaacaactcaaagctagggcttccaggctataggtgaatttaaatattttctggttgacaattggttgagtttgtctaaagacctgggatagatagaaaggtaatgttcaggttaagataaagattgtagagtccaaagttcttttgaagtcttatagtggctgcccttagagataataggtgacaaatgtttcctattcaaatcttagttgaactctttaggattgggaggttctagaagaaaaagatctagctatgttaatagagattctttacagatgcaaattttcccccacaaagaacagctttgcagggccctttctttctttctttctttctttctttctttctttctttctttctttctttctttctttcttttttagatggagttttgctcttgttgcccaggctagagtataatggcacgatcttgtctcaccacaacctccacctcctgggttcaagtaattctcctgcctcagtctcccgagtagctatgattacaggcatgcaccaccacacccggctaattctgtatttttagtagacacagggtttctccatgttggtgaggctggtctcgaactcccaacctcaggtgatccgcccacctcagcctcccaaagtgctgggattacaggcatgagccaccatgcccggcctgcagggccatctcagagtatggcaaagaaacatgttttggggtaaaatattttgattttcttatttgtcttataatgttatgccagagtcagtttggaaagtaaatcatgatatataggtttaaataaaacccatctgatgagaatttatgatttgtagagcatgcctccccagactctttagataggaatttgggcaagatgaaaaaaaaatcagagtttagtcctcactacctaagaccagctcagcttggacttcactgttcatgtcactatcagcattttagtcaaaaccactcaataagtctctaggaagttccaaactttcccacatcttcccttctcctttcaagttctccaaactgttccaaccgctgccaggaggtacccagttccaaagttgcttccagattttgagttatctttatagcagttccccactcctggtaccaatttactatattagtctgtttccacagtgctataaagaactgcccgaaagtggttaatttgtaaagaaaagaggtttaattgactcacagtgctgtgtggttagggtcggaggctcaggaaacttgcaatcatggtggaagtggaagcaggcatgtgacacatggcagcaggtgagagagagaaagagagagagagggaatgaaggaggaaccaccatacatggataaaaccatcagatctcatgagaactcactcactatcaggagaacatgaggacagcatgggggaaaccacccccatgacccagtcacctcccaccaggtccaccccttgacacataaggattactatttgagatgagatttgtttaatgacacagagccaaaccacatcagcatgtgacaaaggtctaatatcaagaatctatgagggggcagttccaaaatggctgaataggaacagctccagtctacagctcccagcatgagctacacagaagacaggtgatttctgcatttccaactgaggtactgggttcatctcacgggggcttgttggacagtgggggcaggacagtgggtgcagcccaccaagagtgagctgaagcagggtgaggcattgcctaacccaggaagtgcaaggggtcagggaattcccgttcctagccaagggaagcggtgatggacggcacctggaaaatccggtcactcccaccctaatactgcacttttccaacggtcttagcaaatggcacaccaggagattatatcctatgcctggcttggaggttcccatgcccacggagcctcgcttattgctagcacagcagtctgagatcaaactgcaaggtggcagtgaggctgggggaggggtgcccacaattgctgaggcttgagtaagtaaacaaagtggctgggaagctcaaactgggtggagtccactgcagctcaaggagacctgtctgcctctgtagactccacctctgggggcagggcatagctgaacaaaaggcagcagaaacctctgcagacttaaatgtccctgtctgacagctttgaagagagtagtgtttctcccacatggactttgagatctgagaatggacagactgcctcctcaagtgggtccctgacccccgagtagcctaactgggaggcaccctccagtaggggcagactgacaccttacacggctgggtgcccctctgagatgaagcttccagaggaattatcaggcagcaacatttgctgttcagcaatattcgctgttctgcagcctctgctgctgatacccaggaaaatagggtctgcagtagacctccagcaaactccaacagacctgcagctgagggtcctgactgtcagaaggaaaactaacaaacagaaaggacatccacatgaaaaccccatctgtacatcaccattatcaaagacaaaaggtagataaaaccacaaagatggggaaaaaacagggcagaaaagctgaaaattctaaaaatcaaagtgcctctccccctccaaaggaatgcagctcctcgccagcaatggaacaaagctggatggagaatgactttgatgagttgagagaaggtttcagatgatcaaacttctccgagctaaaggaggaagttggaacccattgcaaagaagctaaaaaccttgaaaaaagatcagatgagtagctaactagaataaccagtgtagagaagtccttaaatgacctgatggagctgaaaaccatggtatgagaactacgtgatgaatgcacaagcttcagtagccgattcgatcaactggaagaaagggtatcagtgattgaagatcaaatgaaagaaatgaagggagaagagaagtttagaggaaaaaaaagtaaaaagaaagaaacaaaccctccaagaaatatcagactatgtgaaaagaccaaatctatgtctgattggtgtacctgaaagtgacagggagaatggaaccaagttggaaaacactctgcagtatattatccagcagaacttccccaacctagcaagacaggccaacattcaaattcaggaaatacagagaaccccacaaagatactcctcgagaagagcaactccaagacacataattgttagattcaccaaagttgaaatgaaggaaaaaatattaagggcagccagagagaaaggtcgggttaccctcaaagggaagcccatcagactaacagctgatctctcagcagaaactctacaagccagaagagagtgggggccaatattcaacattcttaaagaaaagaaatttcaacccagaatttcatatccatccaaactaagcttcataagtgaaggagaaataaaatcctttacagacaaacaaatgctgatagattttgtcatcaccaggcctgccctacaggagctcctgaaggaagcactaaacatggaaaggaacaactggtaccagccactgcaaaaacatgccaaatcataaagaccaccaaagcgaggaagaaactgcatcaactaacgagccaaataaccagctaacatcataatgacaggatcaaattcacacataacaatattaacctttaatgtaaatgggctaaatgctccaattaaaagacacagactggcaaattggataaagagtcaagacccatcagtgtgctgtattcaggagacccatctcacatgcagagacacacataggctcaaaataaaggcatggaggaagatctaccaagcaactggaaaacaaaaaaaggcaggagttgcaatcctagtctctgataaaagagactttaaaccaacaaagatcaaaagagacgaagaagaccattacataatggtaaagggatcaattcaacaagaagagctaactatcctaaatatatatgcatccaatacaggagcacccagattcataaagcaagtccttggagacctacaaagagacttagattcccacacaataataatgggagactttaacaccccactgtcaacattagacagatcaacgagacagaaagttaataaggatatccagcaactgaactcggctctgcaccaagcagacctaatagacatctacagaactctccaccccaaatcaacagaatatacattcttttcagcaccacaccacacctattccaaaattgaccacatagatggaagtaaagcactcctcagcaaatgtaaaagaacagaaattataacaaactgtctctcagagcacagtgcaatcaaactagaactcaggattaagaaactcactcaaaaccactcaactacatggaaactgaacaacctgctcctgaatgactactgggtacataatgaaacgaaggcagaaataaagatgttctttgaaaccagtgagaacaaagacacaacataccagaatctctgggacacattcaaagcagagtgtagagggaaatttatagcactaaatgcccacaagagaaagcaggaaaaatctaaaattgacaccctaacatcacaattaaaagagctagagaagcaagtgcaaacacattcaaaagccagcagaaggcaagacataactaagatcagagcagaactgaaggaaacagagacacaaaaaaacccttcaaaaaatcaatgaatccaggagctggttttttgaaaagatcaacaaaattgatagaccactagcaagactaataaagaagaaaagagagaagaatcaaatagatgcaataaaaaatgataaaggggatatcaccaccgatcccacagaaatacaaactaccatcagagaatactataaacacctctacggaaataaactagaaaatctagaagaaatggataaatttctcgacacatacaccatcccaagactaaaccaggaagaagttgaatctctgaatagaccaataacaggctctgaaattgaggcaataattaatagcttaacaaccaaaaaaagtccaggaacagatggattcacagccgaattctaccagagctacaaggaggagctggtaccattccttctgaaactattccaatctatagaaaaagagggaatcctccctaactcattttatgaggccagcatcatcctaataccaaagcctggcagagacacaacaaaaaaaaagagaattttaggccaataaccctgatgaacatcaatgcaaaaatcctcaataaaatactggcaaaccgaatccagcagcacatcaaaaagcttatccaccatgatcaagtgggcttcatccctgggatgcaagtctggttcaacatacgcaaatcaataaacgtaatccagcatataaacagaaccaacgacaaaaaacacatgattatctcaatagatgcagaaaaggcctttgacaaaattcaacaacacttcatgctaaaaactctcaataaattagatattgatgggacgtatctcaaaataataagagctatctatgacaaacccacagccaatatcatactgaatgggaaaaactacaagcattccctttgaaagctggcacaagacagagacaccctctctcaccactcctattcaacatagtgttggaagttctggccagggcaatcaggcaggagaaggaaataaagggtattcaattaggaaaagaggaagtcaaattgtcgctgtttgcagatgacatgattgtatatctagaaaaccccatcgtctcagcccaaaatctccttaagctgataagcaacttcagcaaagtctcaagatacaaaatcaatgtgcaaaaatcacacgcatttctataacccaataacagacaaacagagagccaaatcatgagtgaactcccattcacaattgcttcaaagagaataaaataccttggaatccaacttacaagggacgtgaaggacctcttcaaggagaactacaaaccactgctcaatgaaataaaagaggatacaaacaaatggaaaaacattccatgctcatgggtaggaaggatcaatatcctgaaaatggccatactgcccaaggtaatttatagattcaatgacatccccatcaagctaccaatgactttcttcacagaattgggaaaaactgctttaaagttcatatggaaccaaaaaagagcctgcaatgtcaagtcaatcctaagccaaaagaacaaagctggaggcatcacgctacctgacttcaaactatactacgaggttacagtaaccaaaacagcatggtactggtaccaaaacagagatacagaccaatggaacagaacagagccctcagaaataatgccgcatatctacaactatctgatttttggcaaacctgacaaaaacaagaaatgggaaaacgattccctatttaataaatggtgctgggaaaactggctagccatatgtagaaagctgaaactggatcccttccttacacattatacaaaaattaattcaagaggattaaagacttaaatgttagacctaaaaccataaaaaccctagaagaaaacctaggcaataccattcaggacataggcatgggcaaggacttcatgtctaaaacaccaaaagcaatgacaacaaaagccaaaattgacaaatgggatctaattaaactaaagagcttctgcacagcaaaagaaactaccatcagagtaaacaggcaacctacagaatgggagaaaatttttgcaatctacttatctgacaaagggctaatatccagaatctacaatgaactcaaacaaatttacaagaaaaacaaacaaccccatcaaaaagtgggcaaaggatatgaatagacacttctcaaaagaagacatttatggagccaaaagacacatgaaaaaatgctcatcatcactagccatcagagaaatgcaaatcaaaaccacaatgagataccatctcacaccagttagaacagcgatcattaaaaagtcaggaaacaacaggtgctggagaggatgtggagaaataggaacacttttacactgttggtgggactgtaaactagttcaaccattgtggaagtcagtgtggcgattcctcagggatctagaactagaaataccatttgacccagccatcccattactgggtatatacccaaaggattataaaacatgctgctataaagacacatgcacacgtatgtttattgcggcactattcacaatagcaaagacttggaaccaacccatatgtccaacaatgatagactggattaagaaaatgtggcacatatacaccatggaatactctgcagccataaaaaaggatgagttcatgtcctttgtagggacatggatgaagctggaaaccatcattctcagcaaactatcacaaggacaaaaagacaaacactgcatgttctcattcataggtgggaattgaacaatgagaacacttggacacaggaaggggaacatcacacaccagggcctgttgtggggtggggggagtggggagggatagcattaggagatatacctgatgttaattgatgagtttatgggtgcagcacaccaacatggcacatatatacatatgtaacaaacctgcacgttgtgcacatgtaccctaaaacttaaagtataataaaaaaatttttaaaaaaagaaacacctgcttttttctgttttccatttgcttagtagatttttctccatccttttactttgagcctggggatgtcattgcatgtgagatgggtctcttgaagacagcatacatttgggtcttgcttctttctccaacttggcaattctctgccctttaattggggcatttagcccatttacattcaaggttaatattgatatgtgcatatttcatcctgttatcatgttgttagctgctcaatatgcagatttgattgtatagttgatttatagtggcaatcgttatgtacttaagtgtgtttttgtggtggccagtaacgttcttccattatcatatttagcaatcccttaagggcctcttgtaaggcaatctagtggtgatgaatacccttagcatttgcttgtctgaaaaggatcttatttctccttcacttgtgaagcttcgtttggctagatatgaaattcttgcttggaatttcttttctttaagaatgctgaatataggcccccaatctcttctggattgtacagtttctgctgaaacctccattgttagcctcattgggttccctttgtatgtgacctgaaccttctttctagctgcctctaatattttttttcctttcaacctttaagagtctgatgtctgatggctatatgtcttagggatggttgtcatgtataatatcatgcagaggttatttgcatttcttgaatttgaatgttggcctctctggtgaggttggagaaattttcatggaggatagcctgaaatgtttttcaagtttctttttttctctttctcttcttaagggataccaatgtgtcatagatctggtctttttacataattgcacatttctctgaggttttatgccttcttttttattctttgttctttatttttgtctgactgagttaattcagagaatcagtttttaagctctgtgattctttcctcagcttggtctattctgctgttaatacttgtaattgtattctgaaattcttgaagtgagttttttagctctatcaaatcagtttggttctttcttaaaatggccatttcatctttcagcttctgtatcattttactttatttcttagctcccttggattgggtttcaacattctcctgaatctcagtgatcttctttcctgtgcatattctgaattctatgtctgtcatttcagccatttcagtcaggttaagaaccattgctgggaaaccagtgtgattatttggaggtaagaagacactctggattttagagttgcagagtttcttgcattaattctttctcatctttgtgggctgtttctttaatctttgaagtggctgtcctttggatgtttttgtcttttttgttgttttttggtgtgtgtttttgtttgtttgttcatttgtttgttttttgctcttatcttctttgatactcttgcaggtttgattgtggtataaagtggattcagttagcagtgtttcttgaaaatcttagagagtccaggctcacctcagcactcttgtggtgtgttctctgctctgggactgggcccctggctttattctctggccccttgagtttagaaacttgctgcattggaggggctgaggtgttcccagtccattggccacaacactatagtagggggtgccggccaaagcacttcattagagtggtggcagtgggatccattcttactcatgggtgccagcagttgtggagtcatggcagggtgcacatgcatctgctggggtgggggtactggcaggagcagagtggcagcatccctacataggttcctgctggcagtcacagcgcagtgaggtgtccgtgtgttggcagggacagggtggtggggcacacatgcacatgcttgctggtggtagagggagttgtgatctgctgtgcactcatgccagcaaagcagttgggaggtactatgggtggactggtgcacatcagcagaggctggcctgctggaggtctccaatggttaggcatggtctgctggcaaaggagctatgatgagggcccccaggaaacaccctggttgggcttccaaggctgtactgcaagcaggcacagccagcctggggccccaggagaggccagaaggcaaggaaattctcatttcagatgggccctgtcccatggacaagaccaccctgctttattcaggtcccatagtcactctaaggttaaaatctcctagaggaggttggtgagccttgggggatgggtgtcccctggctgtgctccactacagccattctcatgtcaaacactctgggctttacacagactggagtcctgcccctggcatctctctaagcagctgtcccttccagcacaagtgtccatgggggtcatggggtctcctgctgctaggattctggaggcccatggcaacagcaggccactcctcacctgttcaactcaacctttccccaggagttgctgggagccaggaatgagtcctggtgcttggcatccccatgcagggttcccatcttcctccaccttcagctcagcatctgtgtcctcccccatctactctcaatccactctcaatgcctccccttcaaagatctgcttggaaagcacccgtcttcctgatgtctcactccctccatgacagatattcctcctggctgcatctagtcagccatcttgactcacctctgaagtctttttaattaccacttcggttaaattagtaactatcattttacaatggcctgtgattctgttttgatcaaatattttgagccttttagcatctataacaaatgttctcaaaaatcaaaatcctaaatcaagtctctgacttagtcttatttctggggcttattaaggctataaaaactaatcaccataaggttgtacaagctttttacagcttccagtcaggctatgaactccagtatcaccacctccagcctcataattacatatattggaagaaaatcagttaaaggactccctctagacccttgaaagggtgtgagagacaacatggtttcgcctgccttcatgtgtcccagtccatccctgtggctgcctctgtccacctcagcttgcccactgtctttccttcccaactgtctgccctgctgacttctggcttcagtgacagatgcaaagacaaggtgacagccccacatagaccatttaaccagtcccacatttgcataagctaaatggtcatgtaacagtctgttgcccaggctggtctcaaactcctgggctcaagtgatccacccaccttgacccccaaggtgctgggattacaggcttgagccacagtgcccagccaagaacccgtttttgagtgggcaccttggcacacacctgtaaacgcaacactttgggaggccaaggtgggagtgtggcttgaggccaggaggttgaggttgcagtgagctatgatggcaccacctcactccagcgtgggtggcagagtgagatcctttcgaaaaaaaaaaaaaaaaaacttgttttctctgcagccgggctccgtgaccaaacacaaacacaaacttcccctccagagggtccaggaggggctgggctgcaggaggtgcttagggcctcttagggaatggtaagtgaccacccaacgcaggcactcagccccaggggcatatgcagagagagggtccaggaggagctgggctgcaggaggtgcttagggcctcttagggaatggtaagtgaccatccaacgcaggcactcagccccaggggcatatgcagagagaggctgggaggacactttcagtgactggggttacaaaccccaaccataagacattgctggctctgtgagccgccacctccagaaatctcccacttagttcttagcacttatccactcttcccttttcctactctcaattcctggaggatgccctcctttctcaggctcagaccaacctaccagctccactctagacctgaacacataactcctccctctgtctccacctggaaatctcatcagtgcctcacatttacactcctgaaaatcaggtcctgcctacccaccctcttgctccacctgattcctgccctgtttcagccagagaccttgcagtctcctttaactctcaaacccacccatgtcgtgtgagcatactgactgtgttctatgcaagaaagagcagtttcttggtggtcctgcggttttattagtccagaggcaaagcgttggcagagctggtttcttctgaaccctgggagggagattctgttttcatgccttttccagattctagaacccatattccttgctctgtgtccccttcttccatcttcaaaggccatcctctcatctctgtgtccatcatcacatcacccttcccctgactctggttctcctgcttccacttataagcacccctgtgattacatcatacccacccagacaatgcagggccatattctcccctctcgagattaatttaatcacatctacaaagttcctcgtgccatatgaggtcactaaaccacatgttctgggggtttgaatgtaaacatttgggggatgcattattcagccacccacaagcactgctccccactggccacacactatgcacagccgagatcatgcaagtgaggcacgttcatcaacagcagcttcagcaggaaactatatgctccactttcctgccatttgtatctggatttttttttcgctatcattgtagaaagagtggtattgtaaaattaaagatggattattttctttctagaacactttggcaatctatccaacattatttatccccttctgagtgtcaagtgtgaggtcattctttcattgagagctcaatgcctacaattatgataatgcatattgggtactttcacacatcagaaagttcttctttcttaaaatctgttcttgaattattcattcttctctagctttttgttgatctattttataattttagaaaaatcagaaagtaacttgaagtatctgtcatctctacaggtttacctccctctttgtggccttcagaatgtcatgacacgcttttcccttgctcatcacatggtttctatgtatgagacctcatcacaggagctgtggtcccccgggagcaggcatctgtggatggtgccttgctcctggctgctgggacctgtgtgctgccagtggcactccacgacggtgatttcccagctcagttttgcagctccagatggtgggtgagacactaggaccactttgtgaacagcgagggcttggggtttgcttttctaccatgtccagggctgctgttcatgagggaatgtttctaacctgacatcatggctgaagccaacttagaacctctctagccgtatggggagtaggtgagtgatacagatgttaattagctcagtggagccactcccctatgtagacatgttacaaaacattatgctgtacagaataaatataggtcatttttatgtgtcaatcaaaagagaaactaattatttaaaaaaaaaaaaacctctctactcaagccgaaacctcagctccagtcccacaagtcacacaaggctgctcccgtcctgtgtatgttaaacctacctcagaaatgcaaggggcattcaggtttcattctcaattcaaatgccctttttaattttgtctattcctagcacctggcaacttccagctctttttttcgggctcattcattatttaaagcacgtataatttttcacccacattctaacacatgtagtactgtagagaatccttccctaggaggatctacagcattagaaaagaattaagaactccaatatttacaagaaggaaaaagcaaaaagagatcaaaaaatgggcaacttctagaaatagaaaaccctcatgagtatgatgataaatcgctggcacacatgtgaatagttacttgatgcttatagtgatgtctgggaaaataacatgaaatacttataatctgtttctcacacatgtaattcaaaagaatagagagaagatgatttgaaatattcttaagtttgtaggaaaaaagctacttccatatgcataattgcatgtattttgatactgccattattaagaactatctaagagggtccattaaaaataaaatttcttggctgggcacagtggctcatgcctgtatcccagcactttggaaggccgaggcaggtggctcacctgaggtcagaagttcaaaaccagcctggccaacatggtgaaacgctgtatctaccaaaaatacaaaaattagctgggcatggtggcatgcacctgtagtctgagctacttggggggctgaggcaggataatcgtttgaacccaagaggtgtaggttgcagtgagctaagatcataccaccgcactccagcctgacagacaaagcaagactctgtctcaaaaatattaaaataaaatttctcattcctattacagagtaatttaattcattaatgccctgccctgttacaaaactcatttgtaaaatactaattgtaattgtgaaaaaatggcaattgatactaattttaaattctaaaaacagggcacccatattaaagattattctgcagtaagagaattagctataacattttgtaataaggtggagaaaacattctccaacttacaatggttggtgagaagaaagtttccagcacggtagatggaccctaagagcccttgttgaaataataagacaaaaagatatacagagagataagccagatgaagggagacagagagagagagagagagagagagagagaggcacagaaatgagagatacaaagtgaaagagggcaacctgtggggtcatcagacagacacaggggaagaggagaaacacagggcggtggcttgcccttggactgttcttagttcctcaaaacgtaacagctttgcccaacctaagggaactttcagcagctgctcttctgccataggcctctttcctgccttgttttcatgtggctgactgtttctgttcctgcaggtcttagctcatcagacaggcatttattacctctgtgtcaacagtgggagcttccattactctctagcatgacactccccttcctcttttaggaaatttaacatggaagtgagtttgccatcggccttctccccacagtgttaacagtggtgaggaagccagcctgttccaccttgcccctcccatgattccaacactgagttcagacttgtcacatggaacttatctttgcatgtttgtggcacagacagatggacccaaccatggattagtggatggatggatggatggatggatggatggatggatagatggatggatggatggctgagtaggtgtgtggatggaagagtgaaaagatagatggatgcatgtatgggtggatgggtaggttgatggatgcatggatgggtggatggatgggtgagtggatgaatgggtgggtaggtgggtggctacatgcatggatgagtacttggatagataagtgagtggatggatggatggatggatgaatgggtatgtgaagggatggatgtattagagtgggtaattaggcaggcatgagctgatagtcaagggattgttaaactgcctctctaaaataattattggtctcggctggacgcggtggctcatgtctgtaatcccaacactttgggaggctgaggtgggcggatcacaaggtcaagagattgagaccatcctgaccaacatggtgaaaccctgtctttactgaaaatacaaaaattagctgggcgtggtggcgtgcatctatagttccagctactcgggaggctgaggcaggagaattgcttgaacctgggaggaagaggctgcagtgagctgagattgtgccactgcactccagcctggtgacagagcaaagctctgtctcaaataataataataataataaataataattgatctcagccagcgccaagaaaaggcagtctcccaatagatagaaaacacccgaaactggtcatcagcagcttcctgataagatctcaggcattgggtgagtgggctcaagcatatgcactaagaggcaaagtggcagagtttaactggcacataatcttcctctaggaacactctaatagtaagagaaggacacctcaaatgagcatgtgcacatttcattaaacccactgtgtatgcagcccctcccaagtgctggcaggccactgtacatgtgggcagcccactccaagggaagaatcaagggagaagaaatacaaatcccagaaccatgtcaatgtataaaaccccaagtcaagggccggacagagcacttagatctctcaagtcgcccacttagccctcttccaagtgtactttacttcctttagttcccactttaaaactttaataaacatttactcctgctctaaaacttgcttgggtctctcactcttctgtatgccccttggccaaattctttcctccaaggaggcgagaatcaagttgctgcagacctgtatggattcgctcctgctaacagatagctggatgggtggacagatgcatgaattagtggatggacgtttggatgtgtgggtgggtgggtggattgtgggatggctggatgaatgcatggctggatgggtggacacatgcatgaattagtggatggatgtttggatgtgtgggtgggtgggtggattgtgggatggctggatgaatgcatggctggatgggtggacagatgcatgaattcgtggatggacgtttggatgtgtgggtgggtgggtggattgtgggatggctggatgaatgcatggctggatgggtggacagatgcatgaattcgtggatggacgtttggatgtgtgggtgggtgggtggattgtgggatggctggatgaatgcatggctggatgggtggacagatgcatgaattcgtggatggacgtttggatgtgtgggtgggtgggtggattgtgggatggctggatgaatgcatggctgggtgggtggatggatgcatggataagtggtggacggatggacgggtgagtggatgggtggatgtgtgtgtggatgggtggataggaaagccctctaattgattacagggctcagtgtgtgcttcaacatcatgatggcatcatcacattggtccctgtatgaagcagtgggggaggagagtgtaccaggggagcaggaatgacttttctccagaatcgacctctcccaccctgcagcctgggctgtgcaggccacattggagaaggtgcggtcgactactcctaaatgttgttgtgtccaatggcttgttgacgttgatgtaggaatgagcctacatctccaccatagatggaactgtttgggtccccaaagcagaaagcctcttctgttgcaggtgctgaagtttccatcttcttctgcttatacggaagctcacgcatcccttgggtggcaggcgtcaggttcctgtgcgcactgagttccccccttacatgctttggacagaagtgtgagacacacaagattgctgcaggaagtccacctgtggggatgctgcgacttctccagcaagaacacgagtctgctcattgaccatcaccacacataacaaattaagtgtcccttttttgataacacgtcattgtttcacagagtattcttttaaagtgtataagttgactgcagttattattttttacttctgttactaatttactcataattaggcacaatttacacttaagaaatttcttaatagttttttcctccttaaggtgaactacagtcagataacatacttatcaattgtctctagctcttgtcagaaaaacatatagatgtgtgtgtgcgtgtgtcttggcctttccaatgatgaattaagatgtgcattgagaaggcattcactttatttgacgttaaggaagtaccaagaagacgctctccacagaccctgggaaagccagcagctgcaccccgaggctgtgccaggcagggaacaaggaggcagcaccacctgctgggcagggaaaatgtcctcccagtccctgccgcttctctgcagaggcacaaagagctgccccttctcctgggccttctcctgggctgatgagattgctccccgatatgccaaatcagggttgtgcatctgaggctctgtctagactctcagctccttcctactcctgcaaagtgaagaaaacaatgccaaggggtcctggaggcgtctctacccctggagagttttgactctcttcaatagtctccactaccctgccctcactccatgtcctccgtttctccctaaagcggtgcccagtctgattgcactgtggcagggataacgaggggccaggacatcaggggagagaagtttctacctgagtcacagcagcggctgccctgcagactcctgaagacacaagacacatttccatcccagagacccagcgaaatgcaacctcaaactagagacagccagttattttttcttgttctgtcctggagaggccactgagaaagtcgagccccttgttgaggaaaacatgagatctctgtgtgtcgtcctctgcctgatggctgtacctccatgtgagtgtctcagagatttcagaacgggggctgtgggctgtggtgtccgcttgtgactcatctctttgcttcttgtccctgagtgtcctgcatcagatgcagctactggagtcatgcccagggctggtgaggtcctcacagacctctgggcctggacccagcagccctctgggaaggcgctggggcacctcagctccaggggcagcacacacttcagcccagcctttctgggccaactctccatctgtagagacacatccaaggcccagttatccctgcagctgagctccgtgatggccaagggcagggccgcacattcccgtgggagacagaatggggacctcagcgtgagcccagacacaaacctccctgcagggaagcacaagaccaccaggcggcgctccagaccacacagcggccccagaagcaggttttagggggcggggcagacgtgtccgcgttgagtcaggtcattggttttactttccctgagcaaacggcctctgccaaggactcactgcacctctcaccttcacagttgttttttttttttttttttaatcaccctgtagagttttgctagctaatttagatattgaggagtgcttcatacttccttgggcctctgcttgcagaaacatagcaattgtaaggaggcacgtgggaaagccccggctcggtgacccgggggatgctgctgtggccctggcaagagggcgtcgggccgcagtaacaaaggtgcagacggctctcagcctgcgcccgcggagtacaacacataagggctgtaacctaacgaaaaaagaatcgcagtgcaactgtcctgcatttgagtttgtgatcagttttgccctttgtctttaacaggttctaacataaaattttgaatgttggttcaagccctgtgggtaaaatgcacttacccacattccttaaacaaatagaacactgaggtggaaatgttttgaaaaagtagttttcagacatttggaaacaagcatcacaggatcataacccctgagaaaagaaaaacaaatgaacgaatcctgctattgcctgaaagcagctgccaggacacacggaaaggcttagtgagctgagcggacagagagcagagttcaaggcagcagcagcccgaggggaggagcaccggggagcaggctgctgtgcagccaggatgggccggggtggggcggggggagaacagctggagacttgccgcagggagggggatccctcaggtttggggctgagaactgacttatgcctgacttatgcctgcatgaaaagaaactactcgatatcagggggaaatcaccagaaacctgtggacccaaaactacacagagcctacacaaggaaagcattgtttgtgttctcccagccagggtggaaagaccttgagatatgtaaagcttcaagcaatcttccgaagtaatctcgtgagtagtggtgccacattaattcaggactaaaggctgctctgaactgaacctaagaaatgcttcaagtgtagcctggagcccgggtgcagtggctcacacctgtaatcccagcactgtgggaggccgaggcaggcggatcacttgaggtcaggactttgagaccagcctggccaacatggcaaaacctgtctctactaaaaacacaaaaattagctgggcgtggtggcagatgcctgtaatcacctcccacctggacccttccttgatacatcagaattacaactagagatgagattggggtggggacacagagccaaaccgtatcacataggaacctaaaaggataataaagtaggaaaacttcccacatcagtaaccctttatccgatagtaatcccaatctgcaaagtaaaactgtgtgattttactaagataacggaatcttctctacaggactttccagtgcaaaagctccccaccctcaccatgaaatgcacgtgaccatttccaatttgtgtaaagtcctcagttagtactgagacttcggaaggttagaaatccctttgctcatgctgcatggtccggatgagatgtaagaatcattagctaatagacatgcaacagcttttgtgtgaaagatgttatgagacatttaaggtatttgcttgtgattactaagcattcattgtatcattggagcacatgtgcttttataccctggagaaattccagtaattgaattgctgggttgaatgggattttgatttggattaaatttaaactatagattttatttagggaaaactggcatcttaattatgttattggggggcccttgctcccagagctcccaagatggtggcaggccgcttccaaaatgaccgcaggccacttccaagatggtggcaagcctcatgttctctgacctggggttcttggcctcacggattccaaggaatggaagcttgggccatgcagtgagtgttatagctctattagaagccgtgggtcacggaagagaaccgtggaacccagtgactagtgttcagctcgattaggacgaacccaggcacttagccgtgcaggaacaatggcgagcatttggtccgatcgagagtggcaatgggcgcctcgctggatcaggagcacagcggataccctgatggatccggagggatggaagccagcggtgggtctcccacgggggcaaacagcagtggtggacggtgagcgaaagcgaagctcgagccgtaacaaacatggaccagaagagtgcagttgcaagatttagtagagtgaagacagagctcccatacaaagggaggggacccaaagagggtagctgttaccggctcgaatgcctgggtttatatcccgatcattgtccctcccgctgtgctctcaggtgatagatgattggctatttctttacctcctgcttttgcctaattagcattttagtgagctctctttactatctgattggtcgggtgtgagctgagttgcaagccccgtgtttaaaggtggaagtggtcaccttcccagctgggcttagggattcttagtcggcctaggaaatccagctagtcctgtctctcaattacactgagttttccaatccatgcatccaatatgtggtgtatctcttcatatgttcatagcctctgagcaatgttttacaattttctgtgtaaagaactccacatcgttttatgtttcttctaaggtatatcctgattgctttttatgtcttcacaagttttttcctttcaaaattaattttccaattgtttggtgctaatatgctcaaatgtccttgattttcttagtttgaacagtccgtttttgttttggggatttatttttttttcagattctttaagattttctatgtctataaccatataatctctgaacagagacagttttgctttttcctttcaacttgaggtaggttttctgggtagttcaggacgcgcaggcactgggtgggtggtgttagcagctgcacggtgccttggagaggacactctcgggggactgtggccgctgctcagctgtgaccgttcttatagcaccagcagctgcggccaccattcttatccaatttccaaagccacaccacaggccctctcaagaacgaggcgtggaggctatgccctctcctggacacatcatcattcccaagccccacgatgtgggccccatgggacgcacacctttgtctgtccagacctcagccccacctcctcatcctgcaccagaactcttcagagcccagtgcatgaaatgggctaccaaggaaatgagggtaggttcctgagaggaaactggccctgcatttgggagctaggagtctgctaattcgcctggcagcactgtgcagccctccgtggctacagtccaccccgtgcccatcagtgcctccttcctgtgcaagcctggacctcgccctgggctcaggatgggctgtagaccgagaatgcaggcgggaaagtctttgtctatcggggccatagtcaggttctacagtgagtcagggaaaggcctgtggaggtgtggatgaggacaatgggtccaccatcaacaggaggacacaggttcgaccccttgcagaggcacagtcccacatcactgggaggcagccacactcactgcctcgccctctcctcacacagtgcagtttccatgttcacagccccagccagtcaccaggaatgccctgggggcggcctttccccagtgcactccgagccctcccttggctgtgcggtgagctccatgcccaggagatatccacccatagtcctccggaaagcagctgacctgccatgccctggaaccacaaatccccacagatcagccagcctgcagtgggccttggatgtggtgaggagtggtggcacccccgttcccaccccacagatgcaacgcctgtgggtgacgcatgtgagtactgaggagtagagggtagaactgtaggccccgagaaccacagaaactcgggtgttacactctggggccatgtaaggagaaagtgtcactggacagaaacaggcccctcctagacactgtgtgcgccatagtcacctgtcattagctctcactcttgcagattcatgattgaggtggttaaaaaaaaaaaagctcctactcacccatccaaccccatcctggggtgtttccaccacccttggggtttgggatgagctgcccttgcccactgtgctctgtggacctccctttagaagctcacagctccctgcactcggctccatcctgccccaccacacagaagcaaaacccctctcctttccactgcaggcttttcctggaccagaatgctgacctgctgcccttcactcccgaagtggtgggactgcctggggtggtgtgggtgttgagccttcttactctagggacctggcacctggccccaggggcacagggatggtgcatctgcctagggatgcctcctcatgccagggggtgggggttagtaccatcggccctcaggatttgttgcatgaatgagtgaatgggtgaataaatgaaggggatctgatctatgaataagggtatatagactttggttgatgtaggacgccaaatgctggaatttcagagtcatcacacccaggggccctgcctctgagctcctctttgcatccaatctgctgaagaacatggctctagggaaacccagttgtagacctgagggccccggctcttcaatgagccatctccgtcccggggccttatatcagcaagtgacgcacacaggcaaatgccagggtgtggtttcctgtttaaatgtagcctcccccgctgcagaactgcagagcctgctgaattctggctgaccagggcagtcaccagagctccagacaatgtctgtctccttcctcatcttcctgcccgtgctgggcctcccatggggtcagtgtcagggagatgccgtattcacagcagcattcacagactgaggggtgtttcactttgctgtttccttttgtctccaggtgtcctgtcacaggtacagctgcagcagtcaggtccaggactggtgaagccctcgcagaccctctcactcacctgtgccatctccggggacagtgtctctagcaacagtgctgcttggaactggatcaggcagtccccatcgagaggccttgagtggctgggaaggacatactacaggtccaagtggtataatgattatgcagtatctgtgaaaagtcgaataaccatcaacccagacacatccaagaaccagttctccctgcagctgaactctgtgactcccgaggacacggctgtgtattactgtgcaagagacacagtgaggggaagtcagtgtgagcccagacacaaacctccctgcagggatgctcaggaccccagaaggcacccagcactaccagcgcagggcccagaccaggagcaggtgtggagttaagcaaaaatggaacttcttgctgtgtcttaaactgttgttgttttttttttttttttggctcagcaacagagatcatagaaaaccctttttcatatttttgaaatctgttcttagtctaatggagattctctaatatgtgacaatgtttttctcttgctgtttttggaattctttgtctttgacttttgacaacttgacttttgacagtgtgcctcaaagaagttctattttgggttctgtgaacctcctggatctgggaagttttcagctatgatttcattaaacgtgttttctacaccatttccctactcttttggaatacccataatgcaaatatttgttcacttaattgtgtcccataaatgctggggattttcttcattcctttttactctttttttctttttattcatctgcctgaattatttcaaaagatctgtcttcaacttcagaaactcttttgcttggcctagtctaatcttgaaggtctcaattgtacttttaatttcattcattgaattcttcaactctggaatttctgttggttcttttttatgatacttatctctttgttgaattcctcattcaaatgataaattgttttcctgatttcactgaattttctatctgtacactattgtatctccctgagtttcttagagattatccttttgaattatttttctgacattctgtatatttccttatgattggggtctgctactggagaatgactgttgtctttttcaggtgtcgtgtttcctggccttttcatgttttatgtgttcctacgttgatttctacacatctggcggaccagtcatcccttgcaatttaatggagtaggttttgcaggaaaagacttcctagtacagacgggtctcagggtgtcagtgtggcggggcgtgctggctttagttctaggttgacgcagtagcgtagtctccatgtcgtttcttcagctgccgtccacattggtgacgtttgcgagtgtctcagtggcctgggctgagaggtttgtggcagtggaagtgcaacgttgctagaggtggactcaccaggctgtttctgaggtcggggcacatgcatgcacatggtggattgaccaacttggtgccaggctcactagggttggggacatggggctgtttctcaggcccaggatgcaaacacaagtctctttggctggcctgggggtgtggcttctgagggcaatccacagggctgtttctcaggttcaggacacaagtgcatggccgctcaactggcctgggcatgtgtctcccagggccaccccatgggctctttctcagacccaggacatggccacatggcttcctcagctggcctgggtgtgtgtctgctggggggctgcaggggcacagggttatttctcaggccggggtcatgggcgcacagctgcttgctggcttataggagtgcctgccaggggtggcccatgatgctgtttctcaggcctaatttcaggtgcagagcctttgggcaggtcaacggcatacctgtggaaattggagtggatgccacagggctatttctcaggtgcctgagtgtgggcacatatccactctgccagcctggagttagtatcaggtgctcggtggctcaggggcctctcctgctcaggggagggccctcagcagcttggccaaatcaatggtggattcaccctgggcaggcctggcaggctcttcctccagctggatgtgcagcagcaggggttgggttttttgctgtgcagggccagagtcacggccaatcctcagcctaggctctgcacagccagggttgtggcattcagccacccagatatgggcatcctgaagatggagccccaatgctagaaaggggcagtggctaccagcctcagggcaggatgcactccagaggcggctccggtctcaaggtggcgctgggctgcagcagctaggctcacagtggatgaatgggggcagggagtacacaccttgtgctcctaatctgggatcattcctggcagctcccaaacttggctgagggcttgcaaaacctgtggaattctcctgttgcaagggctgtagatgtttgcagtggcagtgggtgctggcgggaaatctgcttaccttttccctacatgggaagtccctcctgtgtccagaccaatccgatctgggtggggaagacaaggctgcaaaggccaggtgcctccatgctgccctccgatcaccacgggtgcgtttccacacctccactgcactccgtcagtctcccttcaacactccagtcaaaccttagctgtttcttctttgccttattccttcctcatggggagggtgtgggtgaacaccaggcttctctaagttcttcatccatcttgctgatgtcattctccatccaggcatgggtttttaagaagtagtgaatactgaaatttcagcagaggacacctctataaaaattctgcaactggaaaacctccttaaattggctgattgtcattacaattggaggaaaactgccaataatttcaaatttagaaggctgagactctataaacaaagactaacaatatgttttctgatatttttccccaaaataatacttttccaagacgaaaatttttccagggtatataagcacatgtgctccaatgatacaacaaatacttactaatcataagcaaataccttaaatgtcttataacatctttcacacaaaagctgttgcatgtctattagctaaaaattcttatgtctcgtccagatcatgcagcatgagcaaagggatttttgaccttcaaaagtctcagtactaactgaggactttacacaaattggaaatggtcacctgcatttcatggtggtggtggggagcttttgcactggaaaatccttctgtagagaagattccattatcttggtaaaattacatagttttattttgcagattgggattaccaactgataaagggttactgatgtggaagttttcctactttattctcctattaggttcctatgtgatatggtttggctctgtgtccccaccccaatctcatctccaattgtaattcccatgtgtccagggagggtccaggtgggagtgattagatcaagggtggtttttcccaggctgttttcatgatagggtgttatcatgagatatgatggtttaaaagtggcaggttcccctgctctctctctcgcctgctgccacataagacgtgccttgctttcccttcaccttctgccatgattgtaagtttcctgaggcctccccagccatgcggaactatgagtcaattaaacctcctctctttataaattacccagtctcaggtagtatctttatagcggtgtgaaaatggactaatacactatggctttgaattaataatttaaaatttgtcagcttggcaataaaacatcctgttgacatttattttttaggtaatattttaaattggcagtttcattcatgtttttacaaattcttattttcagggtgtttaaggcctttgctttgaacttggtggttccttacactccatgctgttagtgaagagggaccaggttgggaggcattggtttgggtggtggtcaggaagggcagagtgatttgagtagggtctgagtggataatagctcatcagtttggaatttataaatgaccagggatgatttaaggagattcctgccagacacctatgccatggccatgccctatctggatctccagccgtgagatgagaacccagccatgcgggggagtctgttcgttctgctcaatgttgtaagtggcacatgctattggataatgtagaattgaatggatatcattttattattataatttacaaacttcctacaataaacttatcacctttatacatagaaacaaatataagtacattttccctcccctatgtcattttgagcccctctctccaaaccatcctcccactctgcgacctcactgtccctgcatttggctatgctctggcaagtccctgcttagacaagcactcaccagaccaccctactcagcctccccttcagcgcccacctggcccacctgctcaaatacatgttgagtggtcacacacatggactgaacaccatctattccatgcactgccccagtgaccgcactgagcagcaagagagaaatgatgcattagctatcaaggatgccaattcaaatgctggagtctttctcagatacttttcaatgttcaagaattgttgattgtgaattctatacccaatgaaactatccttcagaaatgagcagaaaatggataccttctcaaataaacaaaaactaaaagaattcttgctacaagatgtactcttaaagactggctaaaggaagttcttcaaacagcaaggaaattgaattgatcttatgtcctgcacacttgctaaatttcctctcaattttagcagcactgtttagattccataggattttccatacaaacagtcatgtggtctatatatagagacagattttcctcttttccagtggggataaatttatgtctttttctttctgtgttacagcaggtaggacctccagtacaatgttaaacagaagtggtgaaaacagacattcttgcctgtttcctaacgttggagtttggtcttttactatggtgtcagatgttagctgtagggtttttataaatgcccttcatcacattgaggaagtttgctcctatgcctaattttctgagagtcttttaatgtgacactcatgctagaatttattaaatgctttctgtctactaagatgattatgcagttcttatattaacatgaataattacatttatttattctttaatatcaaggcaattttgcattcctgagacaaaccccatttagtcatcatgtgttgttattgttacatattgttggattcaatttcctcaaaatttgttaagaattgttacatctatgtttacaaggaagattagtctgtagggtattttttcttataataactttgcctagttttgcaatcagggtaatgctggactcacagaatgagttgggaagctatttcctcctcttcatttttctgaaagaatttgtataaaattggaattatatcttccttaaaggtttgcaagatttcataatgaagtcattggcctagagttttctttgtgggaaagtctttgtttgtttgttttgtggtttgggtttttttttaagagacacagtctcactctgttgcccaggctggaatgcagtggtgtaatcatagctcacagcagcctcaacctcctgggctcaagcaatcctcctacctcagccttcagagtagctgggactacgggcatgtaccaccacacccagctgtttgtttgtttgtttatcgctttgtcttgtttttgaggtcttattatgttgcccaggctggtcttgaactcctggcctcaagtaatcctcatgcctcagcctcccacagtgctggaattacaggcatgagccactgcacacagactgtgggaaagtttttaactaaaaattcaattttctcttccttttccagtgagctttccagtgtctttcaattaatgtatctattttatctaagttgttgaatttattgtcaaaatttttttaaacaatattcctctcttagaggttgaacatctgtagaatctgtagtgatggcacctcttaaatccctgatcttgctcatctgtgtcgtctctctttctctaatcagtatgcctaaagtttaatttcattgattttcttaaaaaactggttttggttttattgatttttttccctagttttttgtgttacatttcattgacttctgctctgatatttactatttcctttctactgcctacagtaagtttaatttgctattttcttagtttcctaaagtggaagctaagtttattgacttgaggcctttcctctgtctggatgcggatatttgctgctaaacatttccctccaacaccatgctgtgagttttagttacagcgggcttggagttggcctgagaaattctacttaaacagctgcacctatcatgtaagtgataaatgatgtacctgcctggccctcacccctggtcaaagaatgggatgtactaatgagcaatgttgctgcgtagctgtggatttcaaggtattttctgtgtggttttatcatcagcattgtttgttgatgactgcaagactgatgatttgcacctggcctcggtgagatccccgaaagaccctgcagatgggctggttacttagcagaaaatatgacaacgtggccagcaggaaacaggaaggtacaatcggctgcaggtgagctgttggaagtaagttccaattttcctattttgtatttgcattttaatagtgagactgcgcttatgttatttgtgtgaaacagctttattcatagcactgtaatttaaagagaaaacccattcatgggaacaacaaacgacctagacaccaaggtagctcatgccatccaaggctatactgtgcagtgattgggaaaatgggcactggtcccagaagtctgatcgacactctgccactggctagtcccgtgctggggggcgaggatccacactctgccactggttagtcccatgctggggacaagtatccacactctgccactggctagtcccgtgctggggggcgaggatccacactctgccactggttagtcccatgctggggacaagtatccacactctgccactggctagtcccgtgctggggggcaaggatccacactctgccactgattagtgttgtgaagatttaaataaagaacccacaccatattctttgacttgtgctttccgtatactgagagatagtaagagtacattattattatttataaagtaaactagaaagcacatgggaagacaagaagaaaacctgaataaacatgaattaccccattttcctcaggagaaaactttcacactctgaaggtacacaaattagcctacaaatttaatgtaaagcaaatagactgttgtaggtaccaattctcaatgtcacagtgttacatggaaagtaaaatacacaagaacagcccaaaagatggaaacaatggacgtggtcaaatgacatcagtacaacatccatatggtcctaagtagccatctttaaaatgggttagaaatgccttcaatcattcacacagacacatgcattgaacaaactctaagaagtgttcttacacgggaaaagcaagttacagatgcatgggcatgatatggatgtagatgtgtgtatgtgcatcccactcatacacaaaatacccagcatcgcccacatgcctgctgtgtgcgtaagtgtgagcgagtgcacagacaacagcgtgcagaaattcaaaccaagctgtgggtacttgttaccactgggaagggagtcggtcacagagggaaagagaaacaggacatcagcctttgacttcagaactgttcctgccttttcacatcctgtgctgttttcagcatcgtcggagcccttaacacacatcacgggagtaagagtgtgttagagggagcattcggtgggacagatattgccatggcttgtggatagagttcacagtccttaataatccccgagatggcagccaagagctacgttctcaatcacgcagcttcaccccagaaactgacagaaacccaacaaccaaaaggtgtccattctgacagcctcagcctgtgctggctcagatgagcaaaaatgtacagatattaataatgatgttgatttgaagagcacagaggggggtatgcatgataagggtccaaatttttaccttaaaaaagaatacatttacttctcaatcacctacataacgatcattttttaaaaaactgatcaaatttggtgttacaagggcacgttgcaaattcttctggctacttttctctgactattctaattacgttaccgtgttttctcctgtatgtgcccgttcatgtgaatgtcatttctggctacttttctctgactattctaattacgttaccgtgttttctcctgtatgtgcccgttcatgtgaatgtcatttctggctacttttctctgactattctaattacattaccgtgttttcctgtatgtgcccgttcatgtgaatgtcatttctggctacttttctctgactattctaattacgttaccatggtttctcctatatgtgcccgttcatgtgaatgtcatttctggctacttttctctgactattctaattacgttaccgtgttttctcctgtatgtgcccgttcatgtgaatgtcatttctggctacttttctctgactattctaattacattaccgtgttttcctgtatgtgcccgttcatgtgaatgtcatccaggcagatttcccaaatccggcttcctgtaaccaagggctgaaagagggaacggtttcctgggaatcctttttgcagtttattttacccggaggcagaagcccacggttccgtgaagagtctattgctctcccctctctccttttgtgtctctatttttaattgacaaaaaagcaaatgtgaagattcctggggtacaatgcaaagtgacaatgcctgtctatattgtgggatgattaaaacaaggtaagtggcatatccatcacctcacacacttatcattttgtggtgagaacatttaaaatctcatcttttagcaattttgaaatagtcattattgttaactatagtcaccatgctgtgcaacagatcaaaagaactgactcctcccatcagcagaaacttcatgccctttgaccagcatctctcctttccccgtccacgactaacccccagcccaagagaacagccaacacccacctcgctgctgccacacgacatgtcgggctttgatgggatggaggtgagggtggggaagacaattccaaagctggagcactggcctcacagctcagacactcttctacttatcctgagagaatgatgtgctgagaccaactaaacctcccctgctcttcccacatggcagaaaagaggcaacccagggaagccattgccaggacatcatggtcacccaacccttgtgcagaaaggaagcacctgcccaggatgccatagcacccaaccctcatccccaaggaaacacagcccagggcaccatggacacccaaccgtcatccccaggggaggacacagcccagggcaccatggacacccaaccctcatccccaggggaggacacagcccagggtatcttggacacccagccctcattcctaggggagtacacagcccagggcatcttggacatccaaccctcatccccagggaaggacacagcccagggcatcttggacacccaaccctcattcccataagagcacacagcccagggcatcgtggaggcccgaccctcatccctaggggaggacacagcccagggcaccatggacacccaaccctcatccccaggggaagacacaacccaggccaccattaacacccaatcatgtgcagggagggtgtccttggagcctgggactcttgccagtgaagcggtggacaagaaactgaggatgcgatcagcacacagaaatctcaggcagcctaggatacatgaggcctctcacccctgggaacactgagcagccaccaggagcccacaccttgaggtacagcaggagccatgcgctcttgctcttgctcactcacactcctgcacacagccactgacacacgccctcgtgcacgttgcagattaactccactggccttgcacttgcaacgctggaggctgagaggtatccccaggttcttttctcgtgagaggggcaggctgactttcactctcctccatgtgctagaggcagctccaccaacactggctgccctgagtggatgcacctggctctggaattcctgtcatttgctttggatccaggagcccctgcctcatgtagctacttaacagaaaggaggaatccacccaggacatgcccagacgggagcctcacaggatggacagtggtgtctggggtcacgggcagccctgacccagcagcgccagcaccagcacacccagtggggaaggcggggaggcccaaacgccacccacagtttgttactccactgggtgggacccggcacccctgccttcctgacaccctggagtccctgcctcttcctagagcccccaagcccatctgcctcagagcatccagagacagacctggggagccatttcctcaggccctggacaaggaaacagggaattccaggttatgggtgcctggggcaggtctcaggcaggtgctgggaaccagagagaggggtcaccgcgaggcctcaggcctggcaccagcactttgagcctcagtttaccagcccacgaggtgctgagtctggactggatgaccttcccacccccagtgacctctgccctttcccgagcatgtcagctctgctccagcatcctggtgtgagcgcaatgccactttttttctcaacaaatacgaaaggaggaaggtgcccccagggccctgtgccctgaggatgcctgtgtggaggggtccatttcatcactggtgtcactcacaggaagggacgaagccacctgccttgacggagcttactccacctccgccgaaggccggggaggtccctcacagagaacctgaggcccagcaggctgcagaggtgctggcatggaatgactgctcagacgcccggggccggcagagaggacggatgtgggggaggtgcacactgaggagcctctccttggaggtggagacacgtgcaccacatggaccaggacacagtccacgaagcctcgcatccccctgagctgcagctcaagggcctctctctgagcccagagtcccacccctgggaggcagctgccccagctctgagggaggagggcatccaccaggccctccatctcctgggggcaccagcccagcccagaggctctgcaggactctgcacctccaattcatggccaggactttctggatgtatcttaaggactgaggactccacatcagggaccacacaagaccggggtcccggacacgggggttgggggtgagcatgtcaccgggatgggctgtggcgtcactctggtacttcatccggacagccagggaccaaagccacgccctcagccccaccccacccctgcctcacatggcaacgcagggtctgcagatgcaggagagtgagaagcatggtagccaggcagactagaggacccgagctggggttgagcacctccctgtctacccagggcatggcctgtgagactgcaggtggcctagtgtgtgctgcaggctcaaggtcctgccccagggagcatgacattcaggcccagaaattgcatcgtgctgcacacagtccaaggggataaccctgtgaagttcaggtcaccagcaggcttggggtcaagaccgagctgcagaggacaggtttctggaaggcacagcatcatgggtggagggacttggagcaaggtccttagccccgggaccagtgaatgtgtgcccttatagggaaagggggtctttgcagaagcaagttagctgaaaatcatgaagtggagaggctcccctggattaaaggggtgagccctaatgtaatcacaagtgtccttctaggaggttggcagagggagactgacatagacagaagccaggtgaggtgggaagcggaggcagaggccgagagagcagacgctacgccctggccctgaagacggaggaggagccgagagctcagggatggagagactggaggaggcagggaagttctccccgcaagcctggagggagcatggcctccagcacccccagaccttggccctgcaggattcatctggacctgtggtataaatggtgtttaagccactgggctgtgcaaattgtcatagcagccatggcgcattcctagagggagccctggtggggacccagcaggcagcgacggggccctcacaagcctgtgagccactcagagccgcgagagtggctaggcttggtgaggtgcaggccacgcgcacctccactaaggcagccttagggcccacacttcctctctctctctctctctctctctctctatctctctccctccctccttccctccctcccgctctcttggttggacagctctccatcatccccctggacacgaccacctcccaaggccgagctggggcgctttgctcgaggtgagcactgacatcctgggggtgtgaggggcacctgcccagcggccccgtgtgcaggatgggcggtgggccctagctggcactgggcatatggcccggctggtgcctgcaggctgcagcttttctggggtggctgggatcagtgaaggcctccagagtctgggcctgggatccctgcagtgctggctgaggacaggcggggctgggcagtgagggcactgggtcactatcaccacccacggtttattacttcactaggtgggacctggcacccctgccttcctgacaccctggaatccctgcctcctcctacagcccccaagcccatctccctcagagcctccagagacagacctggggaggcatttcttctgcccccagcagaagcccgggaggccgggaaggcacagtgggtctaaaggagaggatcccaggactgcctgaggggtgactccgacgaggcaagcatagagcccactgagaagcggggtgggagccccaccagggatgggctagttcctcatgaaggaccaggacccaggaaggacaagggggcctgctggggcagggtctgctatgccggagtccctgtgagcctggcccagacctgcctctctctttcctcattggtccccacaggtccgtggtggttgccgtatcgggaggccccatggtggcaggggtgggacacctggtatacgtcgccaggtgtgtccaataggctcatgctcacaccttctcctggcacctgggcaaagcctgagcacccaggcactgaagtgagggcaaggcctcggggccccacaggatggccgaggagacagctgcagggcgcctgggacccctgggctcaggaggtagaaggatacagcctgaaaacccacaccacaagctcaccggccagtgcaggcccacagagctcgaggaggcagccctgagcctcccagggagagatgctctgtgcacgccggcacaggccctgggttacaaaccctaggcacagcccaggagaggcccaggccccagtccagcaaggggttgcaggaagcaagaggtccccggccacagcatgagataagcccatcaagccagggccaggtgggcaatgggaggcaggcagggcttgggggtgagtccctgctgcagcgccgtccactgtcgaccggaggagtttcttccctgtgcggagtccacgggcctcctgtgagtgtgtgcatgggcacaagtgtgtgtgtggctctgctgtgtgtctgtacacacgtatgttttgggtttttttgtgtctcagaccacagagtctgcccctcccaccaaagcccaggcagaaggatgaacccacgcccctggggcccaggcctcagcagcctctgcaggatcattgttcccagttgtcacttgcctttgccacagccctatttctccacaattccttaaagtcctcaacatgcatttaaggcacaaaggtgaaactgcccagaaacatctgactccgccgtggaacccaggagcaagctgggttagctaaggagcggggccgttggcagaggctggggatccaggctgaactttggaggaggcatgtgccagcatgggctcctgactatgtcctcctgggacaaacccaaacccactctttgaatatgggagggactttgctggccccggccctgaccgcagcacttggaaactgaggagtggtcgcctcctccgtgtcacagctgcccgttcaccatcatagaagcaactctgtcacctccatgggcccctctgtggctgctgcctgggtccaagctgagcccagctgcccaggcccagaaggaaagcccaggccaggtgcccagcacagaggcagtcacataccccggggagagccacagcaagcagccaatgttgcccaggagaggagtagctgacaaggtagaacgtgagctgccatcggctcgagaggctttgctggtcctcctggggctctggacatgaccaggaggagcgagggaagaagtcgcatggtggtcccatcctgggtggggcctgatggcagctggccacccgtcccagagtggcagccagatgccagcgccattcccacagtcacatcattggtcacagaatgcaggacatagagtgtcttctttccatcacagtgctgtccagacccatagcctagggtagacctggaagattcaatgtccacacccggggctggagcgtagccatgagccacgccccctgcccgtgcatggaaagccagcccaagctctgctccatccctagccaaagtcagtgtcctttccccttctcccaagtgagctctagccacctgcctaccctgccatctgaggatgacagccttcattccattggaacctggctctgccaccagcaggcttgcagtcctgggcagactccgtcacctctctatgcctcagcctttccatctgcacaggaggaagatgatgatggtggtgatgatgatggcgatggtttccttttgcatctgaggcaaggactaattgagatgatacacatcaggcactgggtatggtgctggtccttcctgagcactcaatctatgtgagctgtccttgtgaaatgggtgtcaccacatttccccacgcagaacatcctttgtctgccatacttgaaacgtctgccccaatactaacagctcctcatggaagatgtgcacacccacccaccctcatactcccaaaggtgcccgtgctttatcaagccaaagtccagccaggaactttacagcagcatccctttccctctccaagcaccaaggagcaaggcaaagcactacatcttccatctggaggcaatgccaccctcttctcccattttcactgccatccctaagaggcagtgcttccccaaaaggttccatagcagcctgcctacagcaactctgttcacacgagtttcagcatccttgcagtggctcccctgccatgctgtggctcttcattcaccctcttctcctgctccccgtgacaggcatagattctgagtgatctggatacattgctttgtttaataacattacagcttctgtgctgaaaaagatacagcagatagagaaggcaattgttgaacacaaaatagtgacagcagagatgacggcaagttggcatttttcttttctagcaataaaacttaaagctgactcaaggagaaatggaaatcataattggaacagtaatcctcaagaaagcattaagattattaaataattgccctcacagatgacttcaggccaagatggctttatgggtgaagtttagactttcacaaaactaatcagttcccataagaactgctccaggatttggaggaacatgggaaagtctattaaagggatcacaattcacagtccccagagtaaaacatgggctaacttgcattttggcaaagagccaaatgttataaatgacatcctagaaggccaaattctgtccatctcgttgaacaaggacttacaccaggaatttagaactatttatagctcatcccaccactcaggccaatgatgacccatgatcatctcaccagaaatggaaagactcagatgattaatagagtctcaatttctctgagacatctaagagcccagcccaagcccagacccaggagggcacccaggcctggacagagaacactgatatcacaccagccctccagagggaagcagagactccttcaagctctggaaacacaggcccagacagctgcctaaagttgggcaggcttcactgcaaacccaaatcatgaagctaggtaacacctttacagattctttacatttaaaaatcatcaaaacaagagtaaataataaactcaaataatattaatctaatatgtaaaggtcttgtaccattattatgcaaacaacatacataagctaataagaaaaagaacaaatcccttaagaaatcggcaaaaaggatataacacaatttctaaaagaaaacaaatggctagcacacataaggaaaacactttgtgaacagacattcttcagaacattatttataattataaaatagttgaaagcaagatagtgcctgaagaaattatggtgcatacattagtgggactattctgcaaacattcccaattatacttgtcacatatctgtgataacgtgacagccagcattcatggggtgacctcatttggtaaaagggtgcaaagctcaacacgcattgtgagatgactgtggtgtaaaattagtgggattattccgcaaacattcccaattatacttaccgcatatctgtgataacatgacagcattcatggggtgacctcatttggtaaaagggtgcaaagctcaacacgcattgtgagatgactggtgtaaatacaaagaccaaactgtgaaaaggagtccatcaattaatcgatgcttaccttcagttttgggctaatttttaaagtatgctataagcatatgctcctgttataacagaatggagggattatgagagatgatgcaggtgtgtcctgggcctcccctggcccactgggccctagagatgccttcccaggcatcgctgtcagggcttccctcagagggagtcctgtattgacctcaccaccaaggtctggagcaggggatccttagatattggttggggttatctcaccttaggtctgaatttggggttgtcttagactgttttgtgctgttagaatagaatacccaagactgggaaatttatactgaacggaaatttatttctcacagttctagaggctgtgaagtccaagagcacaggtgccagagcaagtccaagagcaagggaaagtccaaagcaagtccaggagcatctggcgaggaccttcttgctgtgtcatcacatggcggaaggcaagaaagagagcaagagggggccgaactcacccttttataacagcaccaatcccacccatgaggtggggaccttatgacctaatcactcttcatactgttacaatggcaatgaaatttcaacatgagttttggaggagagaagcattcaaaccacagcaagggtgctcctacctcctctctcagggcatctgcagaaagagctgcaactgcacgtccttcctccgtccatcctccatcccttcccaatgtccgtgcatatcctgtgacccaggaggtctggcatagggggtgctcctgccttaggtctgaggccctgtctgaagaggggtaggtgaggaggccatctgatggtctgggccaagacagtcacaggacgcatcatttatcatcaaggaggctgagggttgagtctccaggtccagggaactccccacaaagtgggaaccctgcccagctccacacagcctctgctgggggaccctgctctggtgcagagcctggggacaggtcttgagctcagccagagtctgcctccctgtcatttaggaactaaaccaagcggcaggatgctggagcccagcccccatctgaccttacagggccaaggctggggccctgggttcccctcaaggcgcagcaggactggagccccaggcagtgcaggagtggccaaagctggggcttcctccagagcccccaagcatcacggcaccaagaagggtaggaccctggcctgaggaattggcaccaaagccccagaaactaccctggacaccatggagagaggcctggaggggaagcaccaggcactgcctccccttctgatcccacctgaggtggctgccaagcccagagagccgctctgatgtcccccagccctgcagcccagggatacctgtactgtgcccctgggggacccctggccagtctgtgcaaagaagtcaccaccctacactcagagacagtgggggtcctcgtcccacatcctcagagcatggcccggctgctgcagggatggtctcctggtcctcagagcatggcccggctgctgcagggatggtctcctggtcctcagagcatggcccagctgctgcagggatggtctcctggaggccccccagtgctctattgtcagggctccctccaccccccgcaccaagagagagccagaccccagcaaggcttccagtggcttcaggtcacacccctaggctgaccccagccccattaacacctgcctgagaaagctccacgcaccagaactgaccgtctgctccaactcttgacctcccgttctcagggcgtctgctgaaaaggctgcaactgcacatccttcctccgtccgttcccgatgtccgtgtgtctcctgtggccaggaaggtctttctcgggacctgagagccgctccctgaagtgtccccattgggaaggatggggcctgtgtctccaggctctgggaggacagaatcctgacctcaacagtggccggcacggacacaactggccccatcccggggacgctgaccagcgctgggcaacttttcccttccccgacgactgagccccgagcaccctccctgctcccctaccacctccctttacaaggctgtggcctctgcacagatgataatggagcttggctcattcccctagagtcggtagggagttaaggacaaaactcagtttcctccacctgaactcaagtctgcctatgtttacctaatcacacctggtggacagtttggacaaacttgcacactcagagacacagacacttctagaaatcattatctccctgccccggggaccccactccagcagaagtctgctaggcactggcctgggccctcctgctgtcctaggaggctgctgacctcctgcctggctcctgtccccaggtccagagtcagagcagactccagggacgctgcaggctaggaagccgccccctccaggcgagggtctagtgcaggtgcccaggacaagaaagattgtgaatgcaggaatgactgggccacacccctcccgtgcacgccccctcctgccctgcaccccacagcccagccccccgtgctggatgcccccccacagcagaggtgctgttctgtgatcccctgggaaagacgccctcaacctccaccctgtcccacggcccaaggaagacaagacacaggccctctcctcacagtctccccacctggctcctgctgggaccctcaaggtgtgaacagggaggatggttgtctgggtggcccctaggagcccagatcttcactccacagaccccaacccaagcacccccttctgcagggcccagctcatccccctcctcctccctctgctctcctctcgtcgcctctacgggaaatccgggactcagcagtaaccctcaggaagcagggcccaggcgccgtttaataggaggcttcctcacaatgaaacttttagaaagccttgactacaatgatgaccttggtgtggctgtgaacactgtcagctcccacagctgctgcagcaaaaaatgtccatagacagggtgggggcccggggtcgtctgctgtcctgctcagcccacagcacgcatggaggatctgaggtgccacacctgacgcccaggccagaacatgcctccctccagggtgacctgccatgtcctgcattgctggagggacaggggcagcctatgaggatctggggccaggagatgaatcctattaacccagaggaaaactaacaggacccaagcaccctccccgttgaagctgacctgcccagaggggcctgggcccaccccacacaccggggcggaatgtgtacaggccccggtctctgtgggtgttccgctaactggggctcccagtgctcaccccacaactaaagcgagccccagcctccagagcccccgaaggagatgccgcccacaagcccagcccccatccaggaggccccagagctcagggcgccggggcagattctgaacagccccgagtcacggtgggtacaactggaacgaccaccgtgagaaaaactgtgtccaaaactctctcctggcccctgctggaggccgcgccagagaggggagcagccgccccgaacctaggtcctgctcagctcacacgacccccagcagccagagcacagtggagtccccactgaaccccactgaatggtgaggacggggaccagggctccagggggtcatggaaggggctggaccccatcctactgctatggtcccagtgctcctggccagaactgaccctaccaccgacaagagtccctcagggaaacgggggtcactggcacctcccagcatcaaccccaggcagcacaggcataaaccccacatccagagccgactccaggagcagagacaccccagtaccctgggggacaccgaccctgatgactccccactggaatccaccccagagtccaccaggaccaaagaccccgccccggtctctgtccctcactcaggacctgctgcggggcgggccatgagaccagactcgggcttagggaacaccactgtggccccaacctcgaccaggccacaggcccttccttcctgccctgcggcagcacagactttggggtctgtgcagagaggaatcacagaggccccaggctgaggtggtgggggtggaagacccccaggaggtggcccacttcccttcctcccagctggaacccaccatgaccttcttaagataggggtgtcatccgaggcaggtcctccatggagctcccttcaggctcctccctggtcctcactaggcctcagtcccggctgtgggaatgcagccaccacaggcacaccaggcagcccagacccagccagcctgcagtgcccaagcccacattctggagcagagcaggctgtgtctgggagagtctgggctccccaccgccccccgcacaccccacccacccctgtccaggccctatgcaggagggtcagagccccccatggggtatggacttagggtctcactcacgcggctcccctcctgggtgaaggggtctcatgcccagatccccacagcagagctggtcaaaggtggaggcagtggccccagggccaccctgacctggaccctcaggctcctctagccctggctgccctgctgtccctgggaggcctggactccaccagaccacaggtccagggcaccgcccataggtgctgcccacactcagttcacaggaagaagataagctccagacccccaagactgggacctgccttcctgccaccgcttgtagctccagacctccgtgcctcccccgaccacttacacacgggccagggagctgttccacaaagatcaaccccaaaccgggaccgcctggcactcgggccgctgccacttccctctccatttgctcccagcacctctgtgctccctccctcctccctccttcaggggaacagcctgtgcagcccctccctgcaccccacaccctggggaggcccaaccctgcctccagccctttctcccccgctgctcttcctgcccatccagacaaccctggggtcccatccctgcagcctacaccctggtctccacccagacccctgtctctccctccagacacccctcccaggccaaccctgcacatgcaggccctccccttttctgctgccagagcctcagtttctaccctctgtgcctaccccctgcctcctcctgcccacaactcgagctcttcctctcctggggcccctgagccatggcactgaccgtgcactcccacccccacactgcccatgccctcaccttcctcctggacactctgaccctgctcccctcttggacccagccctggtatttccaggacaaaggctcacccaagtcttccccatgcaggcccttgccctcactgcccggttacacggcagcctcctgtgcacagaagcagggagctcagcccttccacaggcagaaggcactgaaagaaatcggcctccagcaccctgatgcacgtccgcctgtgtctctcactgcccgcacctgcagggaggctcggcactccctgtaaagacgagggatccaggcagcaacatcatgggagaatgcagggctcccagacagcccagccctctcgcaggcctctcctgggaagagacctgcagccaccactgaacagccacggagcccgctggatagtaactgagtcagtgaccgacctggagggcaggggagcagtgaaccggagcccagaccatagggacagagaccagccgctgacatcccgagcccctcactggcggccccagaacaccgcgtggaaacagaacagacccacattcccacctggaacagggcagacactgctgagcccccagcaccagccctgagaaacaccaggcaacggcatcagagggggctcctgagaaagaaaggaggggaggtctccttcaccagcaagtacttcccttgaccaaaaacagggtccacgcaactcccccaggacaaaggaggagccccctgtacagcactgggctcagagtcctctccaacacaccctgagtttcagacaaaaaccccctggaaatcatagtatcagcaggagaactagccagagacagcaagaggggactcagtgactcccgcggggacaggaggattttgtgggggctcgtgtcactgtgaggatattgtagtagtaccagctgctatgcccacagtgacacagccccattcccaaagccctgctgtaaacgcttccacttctggagctgaggggctggggggagcgtctgggaagtagggcctaggggtggccatcaatgcccaaaacgcaccagactcccccccagacatcaccccactggccagtgagcagagtaaacagaaaatgagaagcagctgggaagcttgcacaggccccaaggaaagagctttggcgggtgtgcaagaggggatgcgggcagagcctgagcagggccttttgctgtttctgctttcctgtgcagatagttccataaactggtgttcaagatcgatggctgggagtgagcccaggaggacagtgtgggaagggcacagggaaggagaagcagccgctatcctacactgtcatctttcaagagtttgccctgtgcccacaatgctgcatcatgggatgcttaacagctgatgtagacacagctaaagagagaatcagtgaaatggatttgcagcacagatctgaataaattctccagaatgtggagccacacagaagcaagcacaaggaaagtgcctgatgcaagggcaaagtacagtgtgtaccttcaggctgggcacagacactctgaaaagccttggcaggaactccctgcaacaaagcagagccctgcaggcaatgccagctccagagccctccctgagagcctcatgggcaaagatgtgcagaacatatgtttgtcatagccccaaactgagaatgaagcaaacagccatctgaaggaaaacaggcaaataaacgatggcaggttcatgaaatgcaaacccagacagccagaaggacaacagtgagggttacaggtgactctgtggttgagttcatgacaatgctgagtaattggagtaacaaaggaaagtccaaaaaatactttcaatgtgatttcttctaaataaaatttacagccggcaaaatgaactatcttcttaagggataaactttccactaggaaaactataaggaaaatcaagaaaaggatgatcacataaacacagtggtcgttacttctactggggaaggaagagggtatgaactgagacacacagggttggcaagtctcctaacaagaagagaacaaatacattacagtaccttgaaaacagcagttaaaattctaaattgcaagaagaggaaaatgcacacagctgtgtttagaaaattctcagtccagcactgttcataatagcaaagacattaacccaggttggataaataaacgatgacacaggcaattgcacaatgatacagacatacattcagtatatgagacattgatgatgtatccccaaagaaatgactttaaagagaaaaggcctgatatgtggtggcactcacctccctgggcatccccggacaggctgcaggcacactgtgtggcagggcaggctggtacctgctggcagctcctggggcctgatgtggagcaggcacagagccgtatccccccgaggacatatacccccaaggacggcacagttggtacattccggagacaagcaactcagccacactcccaggccagagcccgagagggacgcccatgcacagggaggcagagcccagctcctccacagccagcagcacctgtgcaggggccgccatctggcaggcacagagcatgggctgggaggaggggcagggacaccaggcagggttggcaccaactgaaaattacagaagtctcatacatctacctcagccttgcctgacctgggcctcacctgacctggacctcacctggcctggacctcacctggcctagacctcacctctgggcttcacctgagctcggcctcacctgacttggaccttgcctgtcctgagctcacatgatctgggcctcacctgacctgggtttcacctgacctgggcttcacctgacctgggcctcatctgacctgggcctcactggcctggacctcacctggcctgggcttcacctggcctcaggcctcatctgcacctgctccaggtcttgctggaacctcagtagcactgaggctgcaggggctcatccagggttgcagaatgactctagaacctcccacatctcagctttctgggtggaggcacctggtggcccagggaatataaaaagcctgaatgatgcctgcgtgatttgggggcaatttataaacccaaaaggacatggccatgcagcgggtagggacaatacagacagatatcagcctgaaatggagcctcagggcacaggtgggcacggacactgtccacctaagccaggggcagacccgagtgtccccgcagtagacctgagagcgctgggcccacagcctcccctcggtgccctgctacctcctcaggtcagccctggacatcccgggtttccccaggcctggcggtaggtttggggtgaggtctgtgtcactgtggtattacgatttttggagtggttattatacccacagtgtcacagagtccatcaaaaacccatccctgggaaccttctgccacagccctccctgtggggcaccgctgcgtgccatgttaggattttgactgaggacacagcaccatgggtatggtggctaccgcagcagtgcagcctgtgacccaaacacacagggcagcaggcacaacagacaagcccacaagtgaccaccctgagctcctgcctgccagccctggagaccatgaaacagatggccaggattatcccataggtcagccagacctcagtccaacaggtctgcatcgctgctgccctccaataccagtccggatggggacagggccggcccacattaccatttgctgccatccggccaacagtcccagaagcccctccctcaaggctgggccacatgtgtggaccctgagagccccccatgtctgagtaggggcaccaggaaggtggggctggccctgtgcactgtcactgcccctgtggtccctggcctgcctggccctgacacctgggcctctcctgggtcatttccaagacagaagacattcccaggacagctggagctgggagtccatcatcctgcctggccatcctgagtcctgcgcctttccaaacctcacccgggaagccaacagaggaatcacctcccacaggcagagacaaagaccttccagaaatctctgtctctctccccagtgggcaccctcttccagggcagtcctcagtgatatcacagtgggaacccacatctggatcgggactgcccccagaacacaagatggcccacagggacagccccacagcccagcccttcccagacccctaaaaggcgtcccaccccctgcatctgccccagggctcaaactccaggaggactgactcctgcacaccctcctgccagacatcacctcagcccctcctggaagggacaggagcgcgcaagggtgagtcagaccctcctgccctcgatggcaggcggagaagattcagaaaggtctgagatccccaggacgcagcaccactgtcaatgggggccccagacgcctggaccagggcctgcgtgggaaaggcctctgggcacactcaggggctttttgtgaagggtcctcctactgtgtgactacagtaactaccacagtgatgaacccagcagcaaaaactgaccggactcccaaggtttatgcacacttctccgctcagagctctccaggatcagaagagccgggcccaagggtttctgcccagaccctcggcctctagggacatcttggccatgacagcccatgggctggtgccccacacatcgtctgccttcaaacaagggcttcagagggctctgaggtgacctcactgatgaccacaggtgccctggccccttccccgccagctgcaccagaccccgtcctgacagatgccccgattccaacagccaattcctggggccaggaatcgctgtagacaccagcctccttccaacacctcttgccaattgcctggattcccatcccggttggaatcaagaggacagcatcccccaggctcccaacaggcaggactcccacaccctcctctgagaggccgctgtgttccgtagggccaggctgcagacagtccccctcacctgccactagacaaatgcctgctgtagatgtccccacctggaaaagaccactcatggagcccccagccccaggtacagccatagagagagtctctgaggcccctaagaagtagccatgcccagttctgccgggaccctcggccaggctgacaggagtggacgctggagctgggcccacactgggccacataggagctcaccagtgagggcaggagagcacatgccggggagcacccagcctcctgctgaccagaggcccgtcccagagcccaggaggctgcagaggcctctccagggggacactgtgcatgtctggtccctgagcagccccccatgtccccagtcctgggggcccctggcacagctgtctggaccctctctattccctgggaagctcctcctgacagccccgcctccagttccaggtgtggttattgtcagggggtgtcagactgtggtggatacagctatggttaccacagtggtgctgcccatagcagcaaccaggccaagtagacaggcccctgctgtgcagccccaggcctccagctcacctgcttctcctggggctctcaaggctgctgttttctgcactctcccctctgtggggagggttccctcagtgggagatctgttctcaacatcccagggcctcattcctgcaaggaaggccaatggatgggcaacctcacatgccgcggctaagatagggtgggcagcctggcggggacaggacatcctgctggggtatctgtcactgtgcctagtggggcactggctcccaaacaacgcagtcctcgccaaaatccccacggcctcccccgctaggggctggcctgatctcctgcagtcctaggaggctgctgacctccagaatggctccgtccccagttccagggcgagagcagatcccaggccggctgcagactgggaggccaccccctccttcccagggttcactgcaggtgaccagggcaggaaatggcctgaacacagggataaccgggccatcccccaacagagtccaccccctcctgctctgtaccccgcacccccaaggccagcccatgacatccgacaaccccacaccagagtcactgcccggtgctgccctagggaggacccctcagcccccaccctgtctagaggactggggaggacaggacacgccctctccttatggttcccccacctggctctggctgggacccttggggtgtggacagaaaggacgcttgcctgattggcccccaggagcccagaacttctctccagggaccccagcccgagcacccccttacccaggacccagccctgcccctcctcccatctgctctcctctcatcaccccatgggaatccagaatccccaggaagccatcaggaagggctgagggaggaagtggggccactgcaccaccaggcaggaggctccgtctttgtgaacccagggaggtgccagcctcctagagggtatggtccaccctgcctatggctcccacagtggcaggctgcagggaaggaccagggacggtgtgggggagggctcagggccccgcgggtgctccatcttggatgagcccatctctctcacccacggactcacccacctcctctccaccctggccacacgtcgtccacaccatcctaagtcccacctacaccagagccggcacagccagtgcagacagaggctggggtgcaggggggccgccagggcagctttggggagggaaggatggaggaaggggagttcagtgaagaggcccccctcccctgggtccaggatcctcctctgggacccccggatcccatcccctccaggctctgggaggagaagcaggatgggagaatctgtgcgggaccctctcacagtggaatacctccacagcggctcaggcaagacccaaaagcccctcagtgagccctccactgcagtcctgggcctgggtagcagcccctcccacagaggatgaacccagcaccccgaggatgtcctgccagggggagctcagagccatgaaggagcaggatatgggacccccgatacaggcacagacctcagctccattcaggactgccacgtcctgccctgggaggaacccctttctctagtccctgcaggccaggaggcagctgactcctgacttggacgcctattccagacaccagacagaggggcaggccccccagaaccagggatgaggacgccccgtcaaggccagaaaagaccaagttgtgctgagcccagcaagggaaggtccccaaacaaaccaggaagtttctgaaggtgtctgtgtcacagtggagtatagcagctcgtcccacagtgacactcgccaggccagaaaccccatcccaagtcagcggaatgcagagagagcagggaggacatgtttaggatctgaggccgcacctgacacccaggccagcagacgtctcctgtccatggcaccctgccatgtcctgcatttctggaagaacaagggcaggctgaagggggtccaggaccaggagatgggtcccctctacccagagaaggagccaggcaggacacaagccccctccccattgaggctgacctgcccagagggtcctgggcccaccccacacaccggggcggaatgtgtgcaggcctcggtctctgtgggtgttccgctagctggggctcacagtgctcaccccacacctaaaacgagccacagcctcagagcccctgaaggagaccccgcccacaagcccagcccccacccaggaggccccagagcacagggcgccccgtcggattctgaacagccccgagtcacagtgggtataactggaactaccactgtgagaaaagcttcgtccaaaacggtctcctggccacagtcggaggccccgccagagaggggagcagccaccccaaacccatgttctgccggctcccatgaccccgtgcacctggagccccacagtgtccccactggatgggaggacaagggccgggggctccggcgggtcggggcaggggcttgatggcttccttctgccgtggctccagtgcccctggctggagttgacccttctgacaagtgtcctcagagagtcagggatcagtggcacctcccaacatcaaccccacgcagcccaggcacaaaccccacatccagggccaactccaggaacagagacaccccaataccctgggggaccccaaccctgatgactcccgtcccatctctgtccctcacttggggcctgctgcggggcgagcacttgggagcaaactcaggcttaggggacaccactgtgggcctgacctcgagcaggccacagacccttccctcctgccctggtgcagcacagactttggggtctgggcagggaggaacttctggcaggtcaccaagcacagagcccccaggctgaggtggccccagggggaaccccagcaggtggcccactacccttcctcccagctggaccccatgtcttccccaagataggggtgccatccaaggcaggtcctccatggagcccccttcaggctcctctccagaccccactgggcctcagtccccactctaggaatgcagccaccacgggcacaccaggcagcccaggcccagccaccctgcagtgcccaagcccacaccctggaggagagcagggtgcgtctgggaggggctgggctccccacccccacccccacctgcacaccccacccacccttgcccgggccccctgcaggagggtcagagcccccatgggatatggacttagggtctcactcacgcacctcccctcctgggagaaggggtctcatgcccagatccccccagcagcgctggtcacaggtagaggcagtggccccagggccaccctgacctggcccctcaggctcctctagccctggctgccctgctgtccctgggaggcctgggctccaccagaccacaggtctagggcaccgcccacactggggccgcccacacacagctcacaggaagaagataagctccagacccccaggcccgggacctgccttgctgctacgacttcctgccccagacctcgttgccctcccccgtccacttacacacaggccaggaagctgttcccacacagaccaaccccagacggggaccacctggcactcaggtcactgccatttccttctccattcacttccaatgcctctgtgcttcctccctcctccttccttcgggggagcaccctgtgcagctcctccctgcagtccacaccctggggagacccgaccctgcagcccacaccctggggagacctgaccctcctccagccctttctcccccgctgctcttgccacccaccaagacagccctggggtcctgtccctacagcccccacccagttctctacctagacccgtcttcctccctctaaacacctctcccaggccaaccctacacctgcaggccctcccctccactgccaaagaccctcagtttctcctgcctgtgcccacccccgtgctcctcctgcccacagctcgagctcttcctctcctagggcccctgagggatggcattgaccgtgccctcgcacccacacactgcccatgccctcacattcctcctggccactccagccccactcccctctcaggcctggctctggtatttctgggacaaagccttacccaagtctttcccatgcaggcctgggcccttaccctcactgcccggttacagggcagcctcctgtgcacagaagcagggagctcagcccttccacaggcagaaggcactgaaagaaatcggcctccagcgccttgacacacgtctgcctgtgtctctcactgcccgcacctgcagggaggctcggcactccctctaaagacgagggatccaggcagcagcatcacaggagaatgcagggctaccagacatcccagtcctctcacaggcctctcctgggaagagacctgaagacgcccagtcaacggagtctaacaccaaacctccctggaggccgatgggtagtaacggagtcattgccagacctggaggcaggggagcagtgagcccgagcccacaccatagggccagaggacagccactgacatcccaagccactcactggtggtcccacaacaccccatggaaagaggacagacccacagtcccacctggaccagggcagagactgctgagacccagcaccagaaccaaccaagaaacaccaggcaacagcatcagagggggctctggcagaacagaggaggggaggtctccttcaccagcaggcgcttcccttgaccgaagacaggatccatgcaactcccccaggacaaaggaggagccccttgttcagcactgggctcagagtcctctccaagacacccagagtttcagacaaaaaccccctggaatgcacagtctcagcaggagagccagccagagccagcaagatggggctcagtgacacccgcagggacaggaggattttgtgggggctcgtgtcactgtgaggatattgtactaatggtgtatgctatacccacagtgacacagccccattcccaaagccctactgcaaacgcattccacttctggggctgaggggctgggggagcgtctgggaaatagggctcaggggtgtccatcaatgcccaaaacgcaccagactcccctccatacatcacacccaccagccagcgagcagagtaaacagaaaatgagaagcaagctggggaagcttgcacaggccccaaggaaagagctttggcgggtgtgtaagaggggatgcgggcagagcctgagcagggccttttgctgtttctgctttcctgtgcagagagttccataaactggtgttcgagatcaatggctgggagtgagcccaggaggacagcgtgggaagagcacagggaaggaggagcagccgctatcctacactgtcatctttcgaaagtttgccttgtgcccacactgctgcatcatgggatgcttaacagctgatgtagacacagctaaagagagaatcagtgagatggatttgcagcacagatctgaataaattctccagaatgtggagcagcacagaagcaagcacacagaaagtgcctgatgcaaggacaaagttcagtgggcaccttcaggcattgctgctgggcacagacactctgaaaagccctggcaggaactccctgtgacaaagcagaaccctcaggcaatgccagccccagagccctccctgagagcctcatgggcaaagatgtgcacaacaggtgtttctcatagccccaaactgagagcaaagcaaacgtccatctgaaggagaacaggcaaataaacgatggcaggttcatgaaatgcaaacccagacagccacaagcacaaaagtacagggttataagcgactctggttgagttcatgacaatgctgagtaattggagtaacaaagtaaactccaaaaaatactttcaatgtgatttcttctaaataaaatttacaccctgcaaaatgaactgtcttcttaagggatacatttcccagttagaaaaccataaagaaaaccaagaaaaggatgatcacataaacacagtggtggttacttctgctggggaaggaagagggtatgaactgagatacacagggtgggcaagtctcctaacaagaacagaacgaatacattacagtaccttgaaaacagcagttaaacttctaaattgcaagaagaggaaaatggacacagttgtgtttagaaaattctcagtccagcactgttcataatagcaaagacattaacccaggtcggataaataagcgatgacacaggcaattgcacaatgatacagacatatatttagtatatgagacatcgatgatgtatccccaaataaacgactttaaagagataaagggctgatgtgtggtggcattcacctccctgggatccccggacaggttgcaggctcactgtgcagcagggcaggcgggtacctgctggcagttcctggggcctgatgtggagcaagcgcagggccatatatcccggaggacggcacagtcagtgaattccagagagaagcaactcagccacactccccaggcagagcccgagagggacgcccacgcacagggaggcagagcccagcacctccgcagccagcaccacctgtgcacgggccaccaccttgcaggcacagagtgggtgctgagaggaggggcagggacaccaggcagggtgagcacccagagaaaactgcagacgcctcacacatccacctcagcctcccctgacctggacctcactggcctgggcctcacttaacctgggcttcacctgaccttggcctcacctgacttggacctcgcctgtcccaagctttacctgacctgggcctcaactcacctgaacgtctcctgacctgggtttaacctgtcctggaactcacctggccttggcttcccctgacctggacctcatctggcctgggcttcacctggcctgggcctcacctgacctggacctcatctggcctggacctcacctggcctggacttcacctggcctgggcttcacctgacctggacctcacctggcctcgggcctcacctgcacctgctccaggtcttgctggagcctgagtagcactgagggtgcagaagctcatccagggttggggaatgactctagaagtctcccacatctgacctttctgggtggaggcagctggtggccctgggaatataaaaatctccagaatgatgactctgtgatttgtgggcaacttatgaacccgaaaggacatggccatggggtgggtagggacatagggacagatgccagcctgaggtggagcctcaggacacaggtgggcacggacactatccacataagcgagggatagacccgagtgtccccacagcagacctgagagcgctgggcccacagcctcccctcagagccctgctgcctcctccggtcagccctggacatcccaggtttccccaggcctgccggtaggtttagaatgaggtctgtgtcactgtggtattacgatattttgactggttattataaccacagtgtcacagagtccatcaaaaacccatgcctggaagcttcccgccacagccctccccatggggccctgctgcctcctcaggtcagccccggacatcccgggtttccccaggctgggcggtaggtttggggtgaggtctgtgtcactgtggtattactatggttcggggagttattataaccacagtgtcacagagtccatcaaaaacccatccctgggagcctcccgccacagccctccctgcaggggaccggtacgtgccatgttaggattttgatcgaggagacagcaccatgggtatggtggctaccacagcagtgcagcctgtgacccaaacccgcagggcagcaggcacgatggacaggcccgtgactgaccacgctgggctccagcctgccagccctggagatcatgaaacagatggccaaggtcaccctacaggtcatccagatctggctccgaggggtctgcatcgctgctgccctcccaacgccagtccaaatgggacagggacggcctcacagcaccatctgctgccatcaggccagcgatcccagaagcccctccctcaaggctgggccacatgtgtggacactgagagccctcatgtctgagtaggggcaccaggagggaggggctggccctgtgcactgtccctgcccctgtggtccctggcctgcctggccctgacacctgagcctctcctgggtcatttccaagacagaagacattcctggggacagccggagctgggcgtcgctcatcctgcccggccgtcctgagtcctgctcatttccagacctcaccggggaagccaacagaggactcgcctcccacattcagagacaaagaaccttccagaaatccctgcctctctccccagtggacaccctcttccaggacagtcctcagtggcatcacagcggcctgagatccccaggacgcagcaccgctgtcaataggggccccaaatgcctggaccagggcctgcgtgggaaaggtctctggccacactcgggctttttgtgaagggccctcctgctgtgtgactacagtaactaccatagtgatgaacccagtggcaaaaactggctggaaacccaggggctgtgtgcacgcctcagcttggagctctccaggagcacaagagccgggcccaaggatttgtgcccagaccctcagcctctagggacacctgggccatctcagcctgggctggtgccctgcacaccatcttcctccaaataggggcttcagagggctctgaggtgacctcactcatgaccacaggtgacctggcccttccctgccagctataccagaccctgtcttgacagatgccccgattccaacagccaattcctgggaccctgaatagctgtagacaccagcctcattccagtacctcctgccaattgcctggattcccatcctggctggaatcaagaaggcagcatccgccaggctcccaacaggcaggactcccgcacaccctcctctgagaggccgctgtgttccgcagggccaggccctggacagttcccctcacctgccactagagaaacacctgccattgtcgtccccacctggaaaagaccactcgtggagcccccagccccaggtacagctgtagagagagtcctcgaggcccctaagaaggagccatgcccagttctgccgggaccctcggccaggccgacaggagtggacgctggagctgggcccacactgggccacataggagctcaccagtgagggcaggagagcacatgccggggagcacccagcctcctgctgaccagaggcctgccccagagcccaggaggctgcagaggcctctccagggagacactgtgcatgtctggtacctaagcagccccccacgtccccagtcctgggggcccctggctcagctgtctggaccctccctgttccctgggaagctcctcctgacagccccgcctccagttccaggtgtggttattgtcaggcgatgtcagactgtggtggatatagtggctacgattaccacagtggtgccgcccatagcagcaaccaggccaagtagacaggcccctgctgcgcagccccaggcatccacttcacctgcttctcctggggctctcaaggctgctgtctgtcctctggccctctgtggggagggttccctcagtgggaggtctgtgctccagggcagggatgattgagatagaaatcaaaggctggcagggaaaggcagcttcccgccctgagaggtgcaggcagcaccacggagccacggagtcacagagccacggagcccccattgtgggcatttgagagtgctgtgcccccggcaggcccagccctgatggggaagcctgtcccatcccacagcccgggtcccacgggcagcgggcacagaagctgccaggttgtcctctatgatcctcatccctccagcagcatcccctccacagtggggaaactgaggcttggagcaccacccggccccctggaaatgaggctgtgagcccagacagtgggcccagagcactgtgagtaccccggcagtacctggctgcagggatcagccagagatgccaaaccctgagtgaccagcctacaggaggatccggccccacccaggccactcgattaatgctcaaccccctgccctggagacctcttccagtaccaccagcagctcagcttctcagggcctcatccctgcaaggaaggtcaagggctgggcctgccagaaacacagcaccctccctagccctggctaagacagggtgggcagacggctgtggacgggacatattgctggggcatttctcactgtcacttctgggtggtagctctgacaaaaacgcagaccctgccaaaatccccactgcctcccgctaggggctggcctggaatcctgctgtcctaggaggctgctgacctccaggatggctccgtccccagttccagggcgagagcagatcccaggcaggctgtaggctgggaggccacccctgcccttgccggggttgaatgcaggtgcccaaggcaggaaatggcatgagcacagggatgaccgggacatgccccaccagagtgcgccccttcctgctctgcaccctgcaccccccaggccagcccacgacgtccaacaactgggcctgggtggcagccccacccagacaggacagacccagcaccctgaggaggtcctgccagggggagctaagagccatgaaggagcaagatatggggcccccgatacaggcacagatgtcagctccatccaggaccacccagcccacaccctgagaggaacgtctgtctccagcctctgcaggtcgggaggcagctgacccctgacttggacccctattccagacaccagacagaggcgcaggccccccagaaccagggttgagggacgccccgtcaaagccagacaaaaccaaggggtgttgagcccagcaagggaaggcccccaaacagaccaggaggtttctgaaggtgtctgtgtcacagtggggtatagcagcagctggtaccacagtgacactcacccagccagaaaccccattccaagtcagcggaagcagagagagcagggaggacacgtttaggatctgagactgcacctgacacccaggccagcagacgtctcccctccagggcaccccaccctgtcctgcatttctgcaagatcaggggcggcctgagggggggtctagggtgaggagatgggtcccctgtacaccaaggaggagttaggcaggtcccgagcactctccccattgaggctgacctgcccagagagtcctgggcccaccccacacaccggggcggaatgtgtgcaggcctcggtctctgtgggtgttccgctagctggggctcacagtgctcaccccacacctaaaatgagccacagcctccggagcccccgcaggagaccccgcccacaagcccagcccccacccaggaggccccagagctcagggcgccccgtcggattccgaacagccccgagtcacagcgggtataaccggaaccaccactgtcagaatagctacgtcaaaaactgtccagtggccactgccggaggccccgccagagagggcagcagccactctgatcccatgtcctgccggctcccatgacccccagcacgcggagccccacagtgtccccactggatgggaggacaagagctggggattccggcgggtcggggcaggggcttgatcgcatccttctgccgtggctccagtgcccctggctggagttgacccttctgacaagtgtcctcagagagacaggcatcaccggcgcctcccaacatcaaccccaggcagcacaggcacaaaccccacatccagagccaactccaggagcagagacaccccaataccctgggggaccccgaccctgatgacttcccactggaattcgccgtagagtccaccaggaccaaagaccctgcctctgcctctgtccctcactcaggacctgctgccgggcgaggccttgggagcagacttgggcttaggggacaccagtgtgaccccgaccttgaccaggacgcagacctttccttcctttcctggggcagcacagactttggggtctgggccaggaggaacttctggcaggtcgccaagcacagaggccacaggctgaggtggccctggaaagacctccaggaggtggccactccccttcctcccagctggaccccatgtcctccccaagataagggtgccatccaaggcaggtgctccttggagccccattcagactcctccctggaccccactgggcctcagtcccagctctggggatgaagccaccacaagcacaccaggcagcccaggcccagccaccctgcagtgcccaagcacacactctggagcagagcagggtgcctctgggaggggctgagctccccaccccacccccacctgcacaccccacccacccctgcccagcggctctgcaggagggtcagagccccacatggggtatggacttagggtctcactcacgtggctcccatcatgagtgaaggggcctcaagcccaggttcccacagcagcgcctgtcgcaagtggaggcagaggcccgagggccaccctgacctggtccctgaggttcctgcagcccaggctgccctgctgtccctgggaggcctgggctccaccagaccacaggtccagggcaccgggtgcaggagccacccacacacagctcacaggaagaagataagctccagacccccagggccagaacctgccttcctgctactgcttcctgccccagacctgggcgccctcccccgtccacttacacacaggccaggaagctgttcccacacagaacaaccccaaaccaggaccgcctggcactcaggtggctgccatttccttctccatttgctcccagcgcctctgtcctccctggttcctccttcgggggaacagcctgtgcagccagtccctgcagcccacaccctggggagacccaaccctgcctggggcccttccaaccctgctgctcttactgcccacccagaaaactctggggtcctgtccctgcagtccctaccctggtctccacccagacccctgtgtatcactccagacacccctcccaggccaaccctgcacctgcaggccctgtcctcttctgtcgctagagcctcagtttctcccccctgtgcccacaccctacctcctcctgcccacaactctaactcttcttctcctggagcccctgagccatggcattgaccctgccctcccaccacccacagcccatgccctcaccttcctcctggccactccgaccccgccccctctcaggccaagccctggtatttccaggacaaaggctcacccaagtctttcccaggcaggcctgggctcttgccctcacttcccggttacacgggagcctcctgtgcacagaagcagggagctcagcccttccacaggcagaaggcactgaaagaaatcggcctccagcaccttgacacacgtccccccgtgtctctcactgcccgcacctgcagggaggctccgcactccctctaaagacaagggatccaggcagcagcatcacgggagaatgcagggctcccagacatcccagtcctctcacaggcctctcctgggaagagacctgcagccaccaccaaacagccacagaggctgctggatagtaactgagtcaatgaccgacctggagggcaggggagcagtgagccggagcccataccatagggacagagaccagccgctgacatcccgagctcctcaatggtggccccataacacacctaggaaacataacacacccacagccccacctggaacagggcagagactgctgagcccccagcaccagccccaagaaacaccaggcaacagtatcagagggggctcccgagaaagagaggaggggagatctccttcaccatcaaatgcttcccttgaccaaaaacagggtccacgcaactcccccaggacaaaggaggagccccctatacagcactgggctcagagtcctctctgagacaccctgagtttcagacaacaacccgctggaatgcacagtctcagcaggagaacagaccaaagccagcaaaagggacctcggtgacaccagtagggacaggaggattttgtgggggctcgtgtcactgtgaggatattgtagtggtggtagctgctactcccacagtgacacagacccattcccaaagccctactgcaaacacacccactcctggggctgaggggctgggggagcgtctgggaagtagggtccaggggtgtctatcaatgtccaaaatgcaccagactgcccgccaaacaccaccccaccagccagcgagcagggtaaacagaaaatgagaggctctgggaagcttgcacaggccccaaggaaagagctttggcgggtgtgcaagaggggatgcaggcagagcctgagcagggccttttgctgtttctgctttcctgtgcagagagttccataaactggtgttcaagatcagtggctgggaatgagcccaggagggcagtctgtgggaagagcacagggaaggaggagcagccgctatcctacactgtcatctttcaaaagtttgccttgtgaccacactattgcatcatgggatgcttaagagctgatgtagacacagctaaagagagaatcagtgagatgaatttgcagcatagatctgaataaactctccagaatgtggagcagtacagaagcaaacacacagaaagtgcctgatgcaaggacaaagttcagtgggcaccttcaggcattgctgctgggcacagacactctgaaaagccctggcaggatctccctgcgacaaagcagaaccctcaggcaatgccagccccagagccctccctgagagcgtcatggggaaagatgtgcagaacagctgattatcatagactcaaactgagaacagagcaaacgtccatctgaagaacagtcaaataagcaatggtaggttcatgcaatgcaaacccagacagccaggggacaacagtagagggctacaggcggctttgcggttgagttcatgacaatgctgagtaattggagtaacagaggaaagcccaaaaaatacttttaatgtgatttcttctaaataaaatttacaccaggcaaaatgaactgtcttcttaagggataaactttcccctggaaaaactacaaggaaaattaagaaaacgatgatcacataaacacagttgtggttacttctactggggaaggaagagggtatgagctgagacacacagagtcggcaagtctccaagcaagcacagaacgaatacattacagtaccttgaatacagcagttaaacttctaaatcgcaagaagaggaaaatgcacacagctgtgtttagaaaattctcagtccagcactattcataatagcaaagacattaacccaggttggataaataaatgatgacacaggcaattgcacaatgatacagacatacatttagtacatgagacatcgatgatgtatccccaaagaaatgactttaaagagaaaaggcctgatgtgtggtggcactcacctccctgggatccccggacaggttgcaggcacactgtgtggcagggcaggctggtacatgctggcagctcctggggcctgatgtggagcaagcgcagggctgtatacccccaaggatggcacagtcagtgaattccagagagaagcagctcagccacactgcccaggcagagcccgagagggacgcccacgcacagggaggcagagcccagctcctccacagccaccaccacctgtgcacgggccaccaccttgcaggcacagagtgggtgctgagaggaggggcagggacaccaggcagggtgagcacccagagaaaactgcagaagcctcacacatccacctcagcctcccctgacctggacctcacctggtctggacctcacctggcctgggcctcacctgacctggacctcacctggcctgggcttcacctgacctggacctcacctggcctccggcctcacctgcacctgctccaggtcttgctggaacctgagtagcactgaggctgcagaagctcatccagggttggggaatgactctggaactctcccacatctgacctttctgggtggaggcatctggtggccctgggaatataaaaagccccagaatggtgcctgcgtgatttgggggcaatttatgaacccgaaaggacatggccatggggtgggtagggacatagggacagatgccagcctgaggtggagcctcaggacacagttggacgcggacactatccacataagcgagggacagacccgagtgttcctgcagtagacctgagagcgctgggcccacagcctcccctcggtgccctgctgcctcctcaggtcagccctggacatcccgggtttccccaggccagatggtaggtttgaagtgaggtctgtgtcactgtggtattatgattacgtttgggggagttatcgttatacccacagcatcacacggtccatcagaaacccatgccacagccctccccgcaggggaccgccgcgtgccatgttacgattttgatcgaggacacagcgccatgggtatggtggctaccacagcagtgcagcccatgacccaaacacacagggcagcaggcacaatggacaggcctgtgagtgaccatgctgggctccagcccgccagccccggagaccatgaaacagatggccaaggtcaccccacagttcagccagacatggctccgtggggtctgcatcgctgctgccctctaacaccagcccagatggggacaaggccaaccccacattaccatctcctgctgtccacccagtggtcccagaagcccctccctcatggctgagccacatgtgtgaaccctgagagcaccccatgtcagagtaggggcagcagaagggcggggctggccctgtgcactgtccctgcacccatggtccctcgcctgcctggccctgacacctgagcctcttctgagtcatttctaagatagaagacattcccggggacagccggagctgggcgtcgctcatcccgcccggccgtcctgagtcctgcttgtttccagacctcaccagggaagccaacagaggactcacctcacacagtcagagacaaagaaccttccagaaatccctgtctcactccccagtgggcaccttcttccaggacattcctcggtcgcatcacagcaggcacccacatctggatcaggacggcccccagaacacaagatggcccatggggacagccccacaacccaggccttcccagacccctaaaaggcgtcccaccccctgcacctgccccagggctaaaaatccaggaggcttgactcccgcataccctccagccagacatcacctcagccccctcctggaggggacaggagcccgggagggtgagtcagacccacctgccctcgatggcaggcggggaagattcagaaaggcctgagatccccaggacgcagcaccactgtcaatgggggccccagacgcctggaccagggcctgcgtgggaaaggccgctgggcacactcaggggctttttgtgaaggcccctcctactgtgtgactacggtgactaccacagtgatgaaactagcagcaaaaactggccggacacccagggaccatgcacacttctcagcttggagctctccaggaccagaagagtcaggtctgagggtttgtagccagaccctcggcctctagggacaccctggccatcacagcggatgggctggtgccccacatgccatctgctccaaacaggggcttcagagggctctgaggtgacttcactcatgaccacaggtgccctggccccttccccgccagctacaccgaaccctgtcccaacagctgccccagttccaacagccaattcctggggcccagaattgctgtagacaccagcctcgttccagcacctcctgccaattgcctggattcacatcctggctggaatcaagagggcagcatccgccaggctcccaacaggcaggactcccgcacaccctcctctgagaggccgctgtgttccgcagggccaggccctggacagttcccctcacctgccactagagaaacacctgccattgtcgtccccacctggaaaagaccactcgtggagcccccagccccaggtacagctgtagagagactccccgagggatctaagaaggagccatgcgcagttctgccgggaccctcggccaggccgacaggagtggacactggagctgggcccacactgggccacataggagctcaccagtgagggcaggagagcacatgccggggagcacccagcctcctgctgaccagaggcccgtcccagagcccaggaggctgcagaggcctctccagggggacactgtgcatgtctggtccctgagcagccccccacgtccccagtcctgggggcccctggcacagctgtctggaccctccctcttccctgggaagctcctcctgacagccccgcctccagttccaggtgtggttattgtcagggggtgtcagactgtggtggatacagctatggttaccacagtggtgctgcccatagcagcaaccaggccaagtagacaggcccctgctgtgcagccccaggcctccagctcacctgcttctcctggggctctcaaggtcactgttgtctgtactctgccctctgtggggagggttccctcagtgggaggtctgttctcaacatcccagggcctcatgtctgcacggaaggccaatggatgggcaacctcacatgccgcggctaagatagggtgggcagcctggcgggggacagtacatactgctggggtgtctgtcactgtgcctagtggggcactggctcccaaacaacgcagtcctcgccaaaatccccacagcctcccctgctaggggctggcctgatctcctgcagtcctaggaggctgctgacctccagaatgtctccgtccccagttccagggcgagagcagatcccaggccggctgcagactgggaggccaccccctccttcccagggttcactggaggtgaccaaggtaggaaatggccttaacacagggatgactgcgccatcccccaacagagtcagccccctcctgctctgtaccccgcaccccccaggccagtccacgaaaaccagggccccacatcagagtcactgcctggcccggccctggggcggacccctcagcccccaccctgtctagaggacttggggggacaggacacaggccctctccttatggttcccccacctgcctccggccgggacccttggggtgtggacagaaaggacacctgcctaattggcccccaggaacccagaacttctctccagggaccccagcccgagcacccccttacccaggacccagccctgcccctcctcccctctgctctcctctcatcaccccatgggaatccggtatccccaggaagccatcaggaagggctgaaggaggaagcggggccgtgcaccaccgggcaggaggctccgtcttcgtgaacccagggaagtgccagcctcctagagggtatggtccaccctgcctggggctcccaccgtggcaggctgcggggaaggaccagggacggtgtgggggagggctcagggccctgcgggtgctcctccatcttcggtgagcctcccccttcacccaccgtcccgcccacctcctctccaccctggctgcacgtcttccacaccatcctgagtcctacctacaccagagccagcaaagccagtgcagacaaaggctggggtgcaggggggctgccagggcagcttcggggagggaaggatggagggaggggaggtcagtgaagaggcccccttcccctgggtccaggatcctcctctgggacccccggatcccatcccctcctggctctgggaggagaagcaggatgggagaatctgtgcgggaccctctcacagtggaatatccccacagcggctcaggccagacccaaaagcccctcagtgagccctccactgcagtcctgggcctgggtagcagcccctcccacagaggacagacccagcaccccgaagaagtcctgccagggggagctcagagccatgaaagagcaggatatggggtccccgatacaggcacagacctcagctccatccaggcccaccgggacccaccatgggaggaacacctgtctccgggttgtgaggtagctggcctctgtctcggaccccactccagacaccagacagaggggcaggccccccaaaaccagggttgagggatgatccgtcaaggcagacaagaccaaggggcactgaccccagcaagggaaggctcccaaacagacgaggaggtttctgaagctgtctgtatcacagtggggtatagcagtggctggtaccacagtgacactcgccaggccagaaaccccgtcccaagtcagcggaagcagagagagcagggaggacacgtttaggatctgaggccgcacctgacacccagggcagcagacgtctcccctccagggcaccctccaccgtcctgcgtttcttcaagaataggggcggcctgagggggtccagggccaggcgataggtcccctctaccccaaggaggagccaggcaggacccgagcaccgtccccattgaggctgacctgcccagacgggcctgggcccaccccacacaccggggcggaatgtgtgcaggccccagtctctgtgggtgttccgctagctggggcccccagtgctcaccccacacctaaagcgagccccagcctccagagccccctaagcattccccgcccagcagcccagcccctgcccccacccaggaggccccagagctcagggcgcctggtcggattctgaacagccccgagtcacagtgggtataactggaacgaccaccgtgagaaaaactgtgtccaaaactgactcctggcagcagtcggaggccccgccagagaggggagcagccggcctgaacccatgtcctgccggttcccatgacccccagcacccagagccccacggtgtccccgttggataatgaggacaagggctgggggctccggtggtttgcggcagggacttgatcacatccttctgctgtggccccattgcctctggctggagttgacccttctgacaagtgtcctcagaaagacagggatcaccggcacctcccaatatcaaccccaggcagcacagacacaaaccccacatccagagccaactccaggagcagagacaccccaacactctgggggaccccaaccgtgataactccccactggaatccgccccagagtctaccaggaccaaaggccctgccctgtctctgtccctcactcagggcctcctgcagggcgagcgcttgggagcagactcggtcttaggggacaccactgtgggccccaactttgatgaggccactgacccttccttcctttcctggggcagcacagactttggggtctgggcagggaagaactactggctggtggccaatcacagagcccccaggccgaggtggccccaagaaggccctcaggaggtggccactccacttcctcccagctggaccccaggtcctccccaagataggggtgccatccaaggcaggtcctccatggagcccccttcagactcctcccgggaccccactggacctcagtccctgctctgggaatgcagccaccacaagcacaccaggaagcccaggcccagccaccctgcagtgggcaagcccacactctggagcagagcagggtgcgtctgggaggggctaacctccccaccccccaccccccatctgcacacagccacctaccactgcccagaccctctgcaggagggccaagccaccatggggtatggacttagggtctcactcacgtgcctcccctcctgggagaaggggcctcatgcccagatccctgcagcactagacacagctggaggcagtggccccagggccaccctgacctggcatctaaggctgctccagcccagacagcactgccgttcctgggaagcctgggctccaccagaccacaggtccagggcacagcccacaggagccacccacacacagctcacaggaagaagataagctccagaccccagggcgggacctgccttcctgccaccacttacacacaggccagggagctgttcccacacagatcaaccccaaaccgggactgcctggcactagggtcactgccatttccctctccattccctcccagtgcctctgtgctccctccttctggggaacaccctgtgcagcccctccctgcagcccacacgctggggagaccccaccctgcctcgggccttttctacctgctgcacttgccgcccacccaaacaaccctgggtacgtgaccctgcagtcctcaccctgatctgcaaccagacccctgtccctccctctaaacacccctcccaggccaactctgcacctgcaggccctccgctcttctgccacaagagcctcaggttttcctacctgtgcccaccccctaacccctcctgcccacaacttgagttcttcctctcctggagcccttgagccatggcactgaccctacactcccacccacacactgcccatgccatcaccttcctcctggacactctgaccccgctcccctccctctcagacccggccctggtatttccaggacaaaggctcacccaagtcttccccatgcaggcccttgccctcactgcctggttacacgggagcctcctgtgcgcagaagcagggagctcagctcttccacaggcagaaggcactgaaagaaatcggcctccagtgccttgacacacgtccgcctgtgtctctcactgcctgcacctgcagggaggctccgcactccctctaaagatgagggatccaggcagcaacatcacgggagaatgcagggctcccagacagcccagccctctcgcaggcctctcctgggaagagacctgcagccaccactgaacagccacggaggtcgctggatagtaaccgagtcagtgaccgacctggagggcaggggagcagtgaaccggagcccataccatagggacagagaccagccgctaacatcccgagcccctcactggcggccccagaacaccccgtggaaagagaacagacccacagtcccacctggaacagggcagacactgctgagcccccagcaccagccccaagaaacactaggcaacagcatcagagggggctcctgagaaagagaggaggggaggtctccttcaccatcaaatgcttcccttgaccaaaaacagggtccacgcaactcccccaggacaaaggaggagccccctgtacagcactgggctcagagtcctctctgagacaggctcagtttcagacaacaacccgctggaatgcacagtctcagcaggagagccaggccagagccagcaagaggagactcggtgacaccagtctcctgtagggacaggaggattttgtgggggttcgtgtcactgtgagcatattgtggtggtgactgctattcccacagtgacacaaccccattcctaaagccctactgcaaacgcacccactcctgggactgaggggctgggggagcatctgggaagtatggcctaggggtgtccatcaatgcccaaaatgcaccagactctccccaagacatcaccccaccagccagtgagcagagtaaacagaaaatgagaagcagctgggaagcttgcacaggccccaaggaaagagctttggcaggtgtgcaagaggggatgtgggcagagcctcagcagggccttttgctgtttctgctttcctgtgcagagagttccataaactggtattcaagatcaatggctgggagtgagcccaggaggacagtgtgggaagagcacagggaaggaggagcagccgctatcctacactgtcatcttttgaaagtttgccctgtgcccacaatgctgcatcatgggatgcttaacagctgatgtagacacagctaaagagagaatcagtgaaatgcatttgcagcacagatctgaataaatcctccagaatgtggagcagcacagaagcaagcacacagaaagtgcctgatgccaaggcaaagttcagtgggcaccttcaggcattgctgctgggcacagacactctgaaaagcactggcaggaactgcctgtgacaaagcagaaccctcaggcaatgccagccctagagcccttcctgagaacctcatgggcaaagatgtgcagaacagctgtttgtcatagccccaaactatggggctggacaaagcaaacgtccatctgaaggagaacagacaaataaacgatggcaggttcatgaaatacaaactaggacagccagaggacaacagtagagagctacaggcggctttgcggttgagttcatgacaatgctgagtaattggagtaacagaggaaagcccaaaaaatacttttaatgtgatttcttctaaataaaatttacacccggcaaaatgaactatcttcttaagggataaactttcccctggaaaaactataaggaaaatcaagaaaacgatgatcacataaacacagtggtggttacttctactggggaaggaagagggtatgagctgagacacacagagtcggcaagtctcctaacaagaacagaacaaatacattacagtaccttgaaaacagcagttaaacttctaaatcgcaagaagaggaaaatgcacacacctgtgtttagaaaattctcagtccagcactgttcataatagcaaagacattaacccaggttggataaataagcgatgacacaggcaattgcacaatgatacagacatacattcagtatatgagacatcgatgatgtatccccaaagaaatgactttaaagagaaaaggcctgatgtgtggtggcaatcacctccctgggcatccccggacaggctgcaggctcactgtgtggcagggcaggcaggcacctgctggcagctcctggggcctgatgtggagcaggcacagagctgtatatccccaaggaaggtacagtcagtgcattccagagagaagcaactcagccacactccctggccagaacccaagatgcacacccatgcacagggaggcagagcccagcacctccgcagccaccaccacctgcgcacgggccaccaccttgcaggcacagagtgggtgctgagaggaggggcagggacaccaggcagggtgagcacccagagaaaactgcagaagcctcacacatccacctcagcctcccctgacctggacctcacctggcctgggcctcacctgacctggacctcacctggcctgggcttcacctggcctgggcttcacctgacctggacctcacctggcctcgggcctcacctggcctgggcttcacctggcctgggcttcacctgacctggacctcacctggcctgggcctcacctgacctggacctcacctggcctgggcttcacctggcctgggcttcacctggcctgggcttcacctgacctggacctcacctggcctgggcttcacctgacctggacctcacctggcctcgggcctcacctgcacctgctccaggtcttgctggagcctgagtagcactgaggctgtagggactcatccagggttggggaatgactctgcaactctcccacatctgacctttctgggtggaggcacctggtggcccagggaatataaaaagccccagaatgatgcctgtgtgatttgggggcaatttatgaacccgaaaggacatggccatggggtgggtagggacagtagggacagatgtcagcctgaggtgaagcctcaggacacaggtgggcatggacagtgtccacctaagcgagggacagacccgagtgtccctgcagtagacctgagagcgctgggcccacagcctcccctcggggccctgctgcctcctcaggtcagccctggacatcccgggtttccccaggcctggcggtaggtttgaagtgaggtctgtgtcactgtggtattactatgatagtagtggttattactaccacagtgtcacagagtccatcaaaaactcatgcctgggagcctcccaccacagccctccctgcgggggaccgctgcatgccgtgttaggattttgatcgaggacacggcgccatgggtatggtggctaccacagcagtgcagcccatgacccaaacacacggggcagcagaaacaatggacaggcccacaagtgaccatgatgggctccagcccaccagccccagagaccatgaaacagatggccaaggtcaccctacaggtcatccagatctggctccaaggggtctgcatcgctgctgccctcccaacgccaaaccagatggagacagggccggccccatagcaccatctgctgccgtccacccagcagtcccggaagcccctccctgaacgctgggccacgtgtgtgaaccctgcgagccccccatgtcagagtaggggcagcaggagggcggggctggccctgtgcactgtcactgcccctgtggtccctggcctgcctggccctgacacctgagcctctcctgggtcatttccaagacattcccagggacagccggagctgggagtcgctcatcctgcctggctgtcctgagtcctgctcatttccagacctcaccagggaagccaacagaggactcacctcacacagtcagagacaatgaaccttccagaaatccctgtttctctccccagtgagagaaaccctcttccagggtttctcttctctcccaccctcttccaggacagtcctcagcagcatcacagcgggaacgcacatctggatcaggacggcccccagaacacgcgatggcccatggggacagcccagcccttcccagacccctaaaaggtatccccaccttgcacctgccccagggctcaaactccaggaggcctgactcctgcacaccctcctgccagatatcacctcagccccctcctggaggggacaggagcccgggagggtgagtcagacccacctgccctcaatggcaggcggggaagattcagaaaggcctgagatccccaggacgcagcaccactgtcaatgggggccccagacgcctggaccagggcctgtgtgggaaaggcctctggccacactcaggggctttttgtgaagggccctcctgctgtgtgactacggtggtaactcccacagtgatgaaaccagcagcaaaaactgaccggactcgcagggtttatgcacacttctcggctcggagctctccaggagcacaagagccaggcccgagggtttgtgcccagaccctcggcctctagggacacccgggccatcttagccgatgggctgatgccctgcacaccgtgtgctgccaaacaggggcttcagagggctctgaggtgacttcactcatgaccacaggtgccctggtcccttcactgccagctgcaccagaccctgttccgagagatgccccagttccaaaagccaattcctggggccgggaattactgtagacaccagcctcattccagtacctcctgccaattgcctggattcccatcctggctggaatcaagagggcagcatccgccaggctcccaacaggcaggactcccacacaccctcttctgagaggccgctgtgttccgcagggccaggccgcagacagttcccctcacctgcccatgtagaaacacctgccattgtcgtccccacctggcaaagaccacttgtggagcccccagccccaggtacagctgtagagagagtcctcgaggcccctaagaaggagccatgcccagttctgctgggaccctcggccaggccgacaggagtggacgctggagctgggcccacactgggccacataggagctcaccagtgagggcaggagagcacatgccggggagcacccagcctcctgctgaccagagacccgtcccagagcccaggaggctgcagaggcctctccagggggacacagggcatgtctggtccctgagcagcccccaggctctctagcactgggggcccctggcacagctgtctggaccctccctgttccctgggaagctcctcctgacagccccgcctccagttccaggtgtggttattgtcagggggtgccaggccgtggtagagatggctacaattaccacagtggtgccgcccatagcagcaaccaggccaagtagacagacccctgccacgcagccccaggcctccagctcacctgcttctcctggggctctcaaggctgctgtctgccctctggccctctgtggggagggttccctcagtgggaggtctgtgctccagggcagggatgactgagatagaaatcaaaggctggcagggaaaggcagcttcccgccctgagaggtgcaggcagcaccacagagccatggagtcacagagccacggagcccccagtgtgggcgtgtgagggtgctgggctcccggcaggcccagccctgatggggaagcctgccccgtcccacagcccaggtccccaggggcagcaggcacagaagctgccaagctgtgctctacgatcctcatccctccagcagcatccactccacagtggggaaactgagccttggagaaccacccagccccctggaaacaaggcggggagcccagacagtgggcccagagcactgtgtgtatcctggcactaggtgcagggaccacccggagatccccatcactgagtggccagcctgcagaaggacccaaccccaaccaggccgcttgattaagctccatccccctgtcctgggaacctcttcccagcgccaccaacagctcggcttcccaggccctcatccctccaaggaaggccaaaggctgggcctgccaggggcacagtaccctcccttgccctggctaagacagggtgggcagacggctgcagataggacatattgctggggcatcttgctctgtgactactgggtactggctctcaacgcagaccctaccaaaatccccactgcctcccctgctaggggctggcctggtctcctcctgctgtcctaggaggctgctgacctccaggatggcttctgtccccagttctagggccagagcagatcccaggcaggctgtaggctgggaggccacccctgtccttgccgaggttcagtgcaggcacccaggacaggaaatggcctgaacacagggatgactgtgccatgccctacctaagtccgcccctttctactctgcaacccccactccccaggtcagcccatgacgaccaacaacccaacaccagagtcactgcctggccctgccctggggaggacccctcagcccccaccctgtctagaggacttggggggacaggacacaggccctctccttatggttcccccacctggctcctgccgggacccttggggtgtggacagaaaggacgcctgcctaattggcccccaggaacccagaacttctctccagggaccccagcccgagcacccccttacccaggacccagccctgcccctcctcccctctgctctcctctcatcactccatgggaatccagaatccccaggaagccatcaggaagggctgaaggaggaagcggggccgctgcaccaccgggcaggaggctccgtcttcgtgaacccagggaagtgccagcctcctagagggtatggtccaccctgcctggggctcccaccgtggcaggctgcggggaaggaccagggacggtgtgggggagggctcaggtccctgcaggtgctccatcttggatgagcccatccctctcacccaccgacccgcccacctcctctccaccctggccacacgtcgtccacaccatcctgagtcccacctacaccagagccggcagagccagtgcagacagaggctggggtgcaggggggccgccagggcagctttggggagggaggaatggaggaaggggaggtcagtgaagaggcccccctcccctgggtctaggatccacctttgggacccccggatcccatcccctccaggctctgggaggagaagcaggatgggagaatctgtgcgggaccctctcacagtggaatacctccacagcggctcaggccagatacaaaagcccctcagtgagccctccactgcagtgctgggcctgggggcagcccctcccacagaggacagacccagcaccccgaagaagtcctgccagggggagctcagagccatgaaggagcaagatatggggaccccaatactggcacagacctcagctccatccaggcccaccaggacccaccatgggtggaacacctgtctccggcccctgctggctgtgaggcagctggcctctgtctcggacccccattccagacaccagacagagggacaggccccccagaaccagtgttgagggacacccctgtccagggcagccaagtccaagaggcgcgctgagcccagcaagggaaggcccccaaacaaaccaggaggtttctgaagctgtctgtgtcacagtcgggtatagcagcggctaccacaatgacactgggcaggacagaaaccccatcccaagtcagccgaaggcagagagagcaggcaggacacatttaggatctgaggccacacctgacactcaagccaacagatgtctcccctccagggcgccctgccctgttcagtgttcctgagaaaacaggggcagcctgaggggatccagggccaggagatgggtcccctctaccccgaggaggagccaggcgggaatcccagccccctccccattgaggccatcctgcccagaggggcccggacccaccccacacacccaggcagaatgtgtgcaggcctcaggctctgtgggtgccgctagctggggctgccagtcctcaccccacacctaaggtgagccacagccgccagagcctccacaggagaccccacgcagcagcccagcccctacccaggaggccccagagctcagggcgcctgggtggattctgaacagccccgagtcacggtgggtatagtgggagctactaccactgtgagaaaagctatgtccaaaactgtctcccggccactgctggaggcccagccagagaagggaccagccgcccgaacatacgaccttcccagccctcatgacccccagcacttggagctccacagtgtccccattggatggtgaggacgggggccggggccatctgcacctcccaacatcacccccaggcagcacaggcacaaaccccaaatccagagccgacaccaggaacacagacaccccaataccctgggggaccctggccctggtgacttcccactgggatccacccccgtgtccacctggatcaaagaccccaccgctgtctctgtccctcactcagggcctgctgaggggcgggtgctttggagcagactcaggtttaggggccaccattgtggggcccaacctcgaccaggacacagatttttctttcctgccctggggcaacacagactttggggtctgtgcagggaggaccttctggaaagtcaccaagcacagagccctgactgaggtggtctcaggaagacccccaggagggggtttgtgccccttcctctcatgtggaccccatgccccccaagataggggcatcatgcagggcaggtcctccatgcagccaccactaggcaactccctggcgccggtccccactgcgcctccatcccggctctggggatgcagccaccatggccacaccaggcagcccgggtccagcaaccctgcagtgcccaagcccttggcaggattcccagaggctggagcccacccctcctcatccccccacacctgcacacacacacctaccccctgcccagtccccctccaggagggttggagccgcccatagggtgggcgctccaggtctcactcactcgcttcccttcctgggcaaaggagcctcgtgccccggtcccccctgacggcgctgggcacaggtgtgggtactgggccccagggctcctccagccccagctgccctgctctccctgggaggcctgggcaccaccagaccaccagtccagggcacagccccagggagccgcccactgccagctcacaggaagaagataagcttcagaccctcagggccgggagctgccttcctgccaccccttcctgccccagacctccatgccctcccccaaccacttacacacaagccagggagctgtttccacacagttcaaccccaaaccaggacggcctggcactcgggtcactgccatttctgtctgcattcgctcccagcgcccctgtgttccctccctcctccctccttcctttcttcctgcattgggttcatgccgcagagtgccaggtgcaggtcagccctgagcttggggtcacctcctcactgaaggcagcctcagggtgcccaggggcaggcagggtgggggtgaggcttccagctccaaccgctccactagccgagactaaggaagtgagaggcagccagaaatccagaccattccatagcaaatggatttcattaaagttaccagacttcagtgtaagtaacatgagccccatgcacaacaatcccttatgaaggggaagtcagtgtcgcctcggatttcttgaaaaacacaaaaacttatcaatgcctgtaaaagtctgttggaaagaaaatatgattcaagaatgttatgcccaacaaagctggcatattttctacccggacacactcagggaatgtggtcccttgagtgcttctctcactgcgtaaatcctacgtggtgtttaagcatattcataaatgtgtatgtctatttttatgtgtaagatggttcatttttattttatttattcaatatgtacaataaagaatattgacaaataggctggacatggtggctcccacctgtaatcccagccctttgggaggccgaggcgggcagatcacctgaggtctggagttcgagaccagcctggccaacatgatgaaaacccatctctactaaaaatacaaagattagccaggcatggtggtgcatgcctgtaatcccagccactcaggaggctgagacaggagaaatgcgtgaacccggaaggcggaggttgcagtgagccgagatcacaccactgcactccagcctggcgacagagcaagattccatctcaaaaaaaaaaagacaaagaaatttgtttttttgaataaagacaaatttcatcacacgaagataaagatgcaaagctccagacaggaaggcacggacagcacagtgaagcccggagcgggcgctggggggccaggggcatggcgggggtgccagcgtctctcggtgcctaccatggccactccagcctgtgttctcacgaggatggctgtgcaatgctaggagcgtgttcgaagctctagggcaaccactggaagtgaggctgaggagcagagcccagaggcccgtggagctgatgaaaagaaagctggagaaagtgtttgctgcctcccaacatggtaagaaaagatagaaagagagagcacacggcaaagggagcttgctgagggactctttacaatggcttgcacagagctcagggggtctgggaggctagggccctgcgcagggcagtcaccccagcctgctgaccaaggtttgctgcaggcagctctgggggtggttgaggcgcggtccctggagccacccctcaagggaacgaggcagcagagtgggccaaggcccaggtcggctgcaaggctgcccaggacttggggtccttacatcagcagccactgatgcagctggcccagagagaggcgccgagcaggttgcctccaggggacaaaccaggtcggagagggtgaggcagtggatggagccacaacaaccccgggcacgggtgacacgcacgttcatgcacatctgacccttcctccctcaccaaacaggtccccctgccttccccatggttgcgaaaaagcaaaatgtagacgttttttcttttttaattcatgttttaattgacaaatgaagccgtatatatttattgtgtacaacatgatgctttaaaatatgtatacatcgtggaacagcaacgttgagctaatttaacacgcattacttcacatacttgtcatcttttgtggcgagaatgcttaaaatccactctcttagtattttttaagaatgcaatacattgttgtcaactgtggtcaccgtcatgcatagccaagctcccgacctcaccctcctgccagctcaggctgtgcatcctttcaccagcatcccccaccccggcccctggccctggtaactaccactctatactctacgtatgagttcagctttttaagattccacagatgaatgagatcatacagtatttgctttctatgcctggcttattttagttaacacactgtcctccagatccatccgttgttgcaaatgacagggtttcattctttttaaagtctaaagagtattccattgtgtcaatggacctcatttgctttatccatgcatcaactatggacatttaggttgattccatttcttagctgttgtggatggtgctgcagtaaacatggggctgcagatgtctcttcaacatactgacatcatgtcctttggataaatacccagtagtgggatcgctggatcacaatgtacagttttttttttaatggaaactttcattttttggtgaaattaggaaaacagataaaacccacagaatccaaaatatatgtgaagatgccaaaaacagttgacattgggcagaggtcacatggaaggaagtgaatacatgacggggtgtgagggcccagaggcagctgaaatacgctttctaaacacaaggacctcttctgagagggcagaagttttatcctgcacatgcaatgaccagcacagctaaaatacactttctaaacatgaggacctcttctgagagggcagctttatcctgcaaatgcaatgaccagcacaggacccagaataaagagagttgccagcggacgcctggtgtccatgtgtccaggtgagttcgagatgcggacggcgctggccagccagtcacaccctaagtcaatctgctgcatgcatttgtccttgccacagcagaaaacgagaaagcctttgggctgcaaagcttcacaggctcctcttctcccgactccatggaaacagctacaaagagcaggcccagtagagcttaattcatgaaaatgagtaataaacttgaactggaacagtatcgactttttagaaacggcagcaaagtgtataaaaaatattcaccagaacaatatttccaaacgatgagatgagaatttcagccaagtaatcctccatggatagaaaataatgaagggattggatttatgaaggaaaatcatggagctcaaatacaagagaagagaatcaaaaatgaacaggaggagataaaatatggtttggccaaagttacaaaataaattttttaaaaacccttcatcatggcaagtagaaagagcgagaggaaaaacagatcccgtggaagacacaaataggacatggggagaaaaatgaatgagatgaaacagagcagaaataaaattttacggaactaaagacaagtgatctgaacctgcctggggcctgggggacctcgccaccctgaagggaaagaacatgcctggctggctttgccacctgctcattgcagagccccacagcttgcaacaaacataggcggtagccagggagtggttacagcaggccttgagcaagacccagtgttgtgctgacttcaggtctgacccagcactgtcatagtggtggtgtccatagtggtagtgggggtgcttgtgtcactccacccccatctccaggaggctcagaacagacagagagagactccatttgtttgggagaaagtaagggatgagaacaagagtctctgcctggtaatccagagaattattctagatcttggccaagattatcaaagcagtacctctatgagtcttttgggcttggagtccccctaaagcagatatagctaagatcacaacacccaagtccttttgaatatgtgggaagacttcccaaggacaggagcaaacaaacaagcccagactgcaaaaaaacaagcccagactgcaataaacacctcactcttcaatgcccaggcactgaagaacatctcctagcagcaacaccatccaggaaaacatggcctcaaccagtgaactaaataaggcaccagggaccagtctcggagaaatagaggtatgttatctttcagagaattcaaagtagctttgttgaggaaactcaaagaaattcaagataacacagtgaaggaattcagaatcctatccgataaatttaacagagattgaagcaattaaaaagaattaagcagaaattatggagctgaaaaatgcaattggcatactgaaaaatgcatcagagtattttcatagcctcttatatcaagtagaagaaagaattagtgagcttgaaaacaggctatttggaaaagcacgataaaaggagacaaaagagaaaagaataaataacaatgaagcatatctacaggatctagaaaatagcctcaaaaggccaaatctaagaattattagccttaaagaggaggtagagaaagagggatggagagtttattcaaagggataataacagaaaacttcccaaacctagagaaagatatcaatatccaaatgcaagaaggatgtagtacaccaaggagatttaatgcaaagaagactacctcaaggcattcaatactcaaactcccatatgacaaggactttaaaaagatcctaaaagcagcaaaagaaaagaaatgaataaaatactatggagctccaatatgtctggcagcagacttttcagtgaagactttatatgccaggagagagtgtcataatggatttaaagtgctgaaggaaaaaacttttaccctcgaacagtatagctggtgaaattatccttcaaacatgaaggagaaataatttgtttccagacaaatgttgagggatttcatgaacaccagacctgtcttttaagaaatgctaaagggagtacttcaatcagaaagaaacacgttagtgaacaataagaaatcatctgaaggcacaaaactcaccggtaatagtaagtacacagaaaaacacagaatattataacactgtaactgtggtgtgtaaactccttttgtttgtttgtttgtttgtttgtttgtttgtttgtttttgtttttagacggagttttgctccagcccaggctggagtgcaatggcacaatctcagctcactgcaacttccacctcccgggttcaagcaattctcctgcctcagcctcccaagtagctgggattacaggcatgtgctaccatgtccagctaattttgtattttagtagagacggtgtttcaccatgttggtcaggctagccttatcttgagtagaaaaactaaatgatgaagcaatgaaaaataataactacaacttttcaagacatagtacaataagatataaatcataacaaaaagttaaaaggtggagggatgaagttaaggcaaagagtctttattagttttctttttacttgtctgtttatgcaaacagtgttaagttgtcatcagtttaaaataatgggtcataagatactatttgcaagcctcatggtaacgtcaaaccaaaagcaatacaacagatacacaaaaaacaaaaagcaagaagctaaattacgtcatcagagaaaatcaccttcactaaaaggaagacggagaaaagaatgaagagagagaagaccaaaagcaaatagcaatatggcaggagtaagtccttacttatcaataataccattgaatgtaaatggactaaactctccaatcaaaagacatagagtggctgaatcaattaaagaaaaaacaagacccattgatctgttgtccacaagaaacacactttatctataaagacacacatagactgaaaacaaagggatggaaaaagatactccacgccaatggaaaccaaagaaagagcaggagtagctacacttatatcaggcaaaatagatttcaagacaaaaactataagaagagacaaggtcactaatgataaacaggtcaattcagcaagaggatataacaattgtaaatatatatgcacccaatgctggagcacccagatatataaagcaagtatttactagagctaaagagagaaatagactccaatgcaataatagctggagatttcaacatcccactttcaacattgaacagatcctccagatagaaaatcaacaaagaaatattggacttaatctgcactatcgaccaaatggatctaacagatatttacagaacatttcatccaacagctgcagaacacacattcttttcctcagcacatagatcattctcaaggatagaccatatgttgggtcacaaaacaagttttaaaatattcaaatacattgaaataatatcaagcatcttctgtgaccacaatggactaaaactagaaatcaataacaagaggaattttggaaactatataaatatatggaaattaatgaatgctgagtgggtcaatgaagcaattaagaaggaaactgaaatttttcttggaacgaatgatcatggaaacagaaaataccaaaacctatgggatacagcaaaagcagtactaagagggaagtttacagctacaaatgcttacattaaaaaagaagaaaaacttcaataaaaaaacctaacaatgcatcttaaagaactagaaaagcaagaggaaatcaaatccaaaattagtagaagaaaacagtaaaggtcagagcagaaataagtaaaattgaaatgaagaaaacaatacaaaagatcaataaaacaacaggttgttttcttgaaaagttaaacaaaattgacaaacctttagccagactaagaaaaaaagacagaagatccaaataaataaaatcagagatgaaaaaggtgacattacaacttacaccacagaaattcaaaggatcattagtggctactataagcaactatatgccaataaattggaaaatctagaagaaatgcagaaattcctagacacatacaacctcccaagattaaaccaagaagaaattcaaaacctgaacagactgataacaagtaatgagatcaaagccgtaataaaaagcctcccagtaaagagaagcccaggacccgacggcttcactgctgaattctaccaaacatttaaagtagaactaataccaatcctactcaaactattccaaaaaatagaggtggaaggaatacttcaaaactcattatacgaggccagtattaacctgacaccaaaactagacaaagacacatgaaaaaaagaaaactacaggccaatatgtctgatgaatattgacacaaaaatcctcaacaaaatactagcaaaccaaattcaactacacattagaaagttcactcatcatgaccaagtggaatttatctaacttgggatgcaaagatggttcaacatatgcaaatcaatcaatgtgatacatcatatcaacagaatgaacaacaaaaaccatttgatcatttaattgatactgaaaaagcatttgataaaattcaacattccttcataataaaaattctcttctatactaggtacaaaagaaacttacctcaacataataaagccatatatgacagtcccacagtatgatactaaatgaggaaaaactgagagcctttcctctacgatctggaacatgacaaagatgcccactttcatcactgttattcaacatagtactggaagtcctagctggagcgatcagacaagagaaagatataaaagacatccaaattggaaaggaataagtcaaattatcctcatttgcatatggtatgatcttctatttagagctaactaaagactccaccaaaaaaagttattagaactgacgaacaaattcagtaaagctgcaggatacaaaatcaacatacaaaaatcagtagcatttctatatgccaacaatgaccaatgtgaaaaagaaattaaaaagtaaccctatttacaataaccacaaataaacacctaggaattaaccaaagaggtaaaagatttctgtaatgaaaactataaaaactgatgaaagaaattgaagagtacaccaaaaaatggaaagcaattgcatgttcatggattagaagaatcagtgttgttataatgtccatactatccaaagcaatctacagattcaatgcaatccttatcaaaataccaatgacatcattcacagaaatagaaaaaaaaaatcctaaaatttacgtggaaccacaaagacccagaatagccaaagctctcctaagcaaaaagaacgaaactgtaggaatgacattgcctgtcttcaaattctactacagagctatagatagtaaccaaaacagcgtggtactagcataaaaacagacacagagacaaacagaacaaaatttaaaaacccagaaataaatccacacacctacagcaaattcatttttgacaaagttgccaagaacatactctggggaatagataatgatatctcttcaataaataatgtggggaaaactggatatccatatacataacagtgaaactagacccctctctctctcactatatacaaaaatcaaatcaaaattgtttaaggacttaaatctaagacctcatactatgaaaccactgcaagacaaccttggcggaaactctccaagacatcagtccaggcaaagatttcttgagtaatatcccacaagcacagacaaccaaagcaaaaatggacaaatgggatcacatcaagttaaaaagcttctgcacagtaagggaaacaaccaacaaaatgaagagacaacccacagaatgggagaaaatatttgaaaaatacccatctggcaagggattaaaaaccagaatatatgcagaatatataaggagctcaaacagtgctatagaaaaaaaaatctaataatctgatttaaaaatgggaaaaatgttagaatagacatttcttaaaataagacatacagatggcaaaccgacatggaacggtgctcaacatcatggattatcacagaaacacaatcaatcaaaactaaaactaaaatgtgctatcatctcaccccagttaaaatggctgatatccagaagacaggcaataacaaatgctggcaaggatgtggggaaaagggagcccccatacactgttgctgggattgtaaattagtacaaccactgtggagagcagcatgaaagttcctcaaaaaactgaaagaaagctaccataggatccagcaatcccactgctgtgtatatactacaaaagaaaggaagtcagtatatgaagaggtatctgcactcccatgtttgttgcagccctgttcacaacagccaagatttggaagcaacctaagtgtccatcagcagttgaatgtataaagaaaatgtggtgcatatacacaatggagtattattcaataataaaaaggaatgagattgagtcatttgcaacaacatggatggaactggagatcattatgtgaagtgaaataagccaggcacagaaagacaaacattacaatgttcttacttattaatgagatctaaaaatcaaaacaattgcacccatgttcataaagagtaaaaggatggttaccagatgctgagaacggtggtggggggatagggaaaggtggcagtggttaacgggtacaaaaaaatagaaagaatgaataagacttactacttgatagcacagcaaggtggctatagtcagtaatttagttgtatatttttaataatgaaaggtgtataattggattgtttctaacacaaaggataatgcttaagaggatggataccccattttccatgatgtgattatttcacattgcacgcctagatcaaaacatccaatgtaccccataaatatatacatcttctatgtacccataaaaattctgtaaaataaaatatataaaaagaggtgacagatatggaagacaggcaaagaagagacgacatccacataatccgagtacctaagaaagaatggagtccagtgcatctcaggagccaccattctaagccaattttctctggttctctcagtcaccctactaatacgtgggcaatcttgttttatttcaggatagagtttttgaaattatagatttaagtatgctttctgttctattacttttggtaattaattttagaaagaactaatttgggcacaaatttgaaaaaattctaaatccaaaaaaaaaaagaaaaaaacacacacacaatcatctataagggggatgatgaccagtcctagatttctcaccagccacattcaagatcagtaaatggtaggacaaaacctgtagggtccttaagggggaaagaagtagtggatagtccagagtctatatacagccaactgttcttgaagaaaaaaggctgctgaaaaggagttccaaacattctataatccataatctcatgatgaaactactagaggaagaccaccagccatcaaaaggtgcttggagaacccagggccaagaaccaaaagtaaatattaagtgtccttaactgcgagactaagatagaaatgactgtgggggaccatgtggcctcaacagaggtgaaatggtgtctgcctgacaaagtggacattttacaatgatcaaaacacagaatatgagatagagagcacttctgaattactgcctcactccaaataactctcagccaaaggacttcagtaaaaccaaattgggcatattagacagtacaaacaaattctaagaaaataatattactgattacaatcacatgatgctagagatggaggggaaaaggaagaggaaaccaggtaatttcatactcgtatatagtaaagaactaaagtacattgtccaaagaagaacaaagaatattttggaaagttataaaggtagccactacacatagaagatagcaaagaacaagaaaacttaagatggaaaactttttggaagcataaaaatagaaaatataaactactaagataagattgaagccaaacagatctatgaaaacaacaaacatcaatggccttaacttgcctattaaaaggaagagactttcaaattggaccacaagataaaacccaactctatatagcatatgagtattacacacaaaatgggaaaagctgaaaaaacttgggcaaaattcaccccaagcaaattccactgtttcctttgggacaaaatgccaagctccatgccagggaagatgattctcctcagaccttctcctcactctcccagtcctcttagggaaggaattgggtgttagaggagggagactctgtcgattatcagctgaagcagtggtgtgctcctgcgttgcttctgacctgggaaatgaagcagcaagactctttctgctgtgtctttgcccagaagggccatccccccagagcagagtacccaggccggcaggagcagtggtggaagcgtggaaaccacgtctcctacagcagagaccatcagaagcggagcctcgggtataagggaaacaacgcgttctccctaacctgggagtgacagacagcgtcattcctcacagtgataccctgtgttctagccatctggcccatgacagagccagcccagagccagcccagagccagcccctcaccaacctggagcctggccagctcgccaagctgcaccataggcctggaaggcgtggagacctgcggcagtgccctgtcctcccgtgaggcctgccatccctgccaggggtcgcctctggcttctcctccaggaccgcacggtccagaggctcagtgcctggagtaggtgttgcccccctgcttctaggcccagaccctcccttgttcctgaccccgggcctttccctctggcttggacatccagggccctgtctcagctggggagctgctcctgctcaaggactgtcttccgcgggatcgaaaggccgcgtcctgaacaatgcgtgggccacgtgagcggagcaggctctaaaggccgcgtcctaaacagtgcgtgggccacgtgagcggagcaggctctaaaggccgcgtcctaaacagtgcgtgggccacgtgagcggagcaggctctaaaggccgcgtcctaaacagtgcgtgggccacgtgagcggagcaggctctaaaggccgcgtcctaaacagtgcgtgggccacgtgagcggagcaggctctaaaggccgcgtcctaaacagtgcgtgggccacgtgagcggagcaggctctaaaggccgcgtcctaaacagtgcgtgggccacgggagcggagcagactctaaaggccgcgtcctaaacagtgcgtgggccacgtgagcggagcaggctctaaaggccgcgtcctaaacagtgcgtgggccacgtgagcggagcaggctctaaaggccgcgtcctaaacagtgcgtgggccacgtgagcggagcaggctctaaaggccgcgtcctaaacagtgcgtgggccacgtgagcggagcaggctctaaaggccgcgtcctaaacagtgcgtgggccacgggagcggagcagactctaaaggccgcgtcctaaacagtgtgtgggccacgtgagcggagcaggctctaaaggccgcgtcctaaacagtgcgtgggccacgggagcggagcagactctaaaggccgcgtcctaaacagtgtgtgggccacgtgagcggagcgccctctccactgccctcggggccgcagctcccagctcagctcccagccctgctcagggcagccaggccaggaggtaccatccaggctaagtgaccctcaggggggacaggtgccccaggagatgccagctgttgggagaggctgggggaccaactcgacctggcctgtgggccctgccctggccacccattgtaggatccagccgccacgcctgtgacactcgtgtgctttccctggtgtgtgcttgtggcaggtgggggcagagggtcctcaggccagagagccactcccccagcgccagaccaccctcttcctcactcccccacctcaccccctcacaggtgcctcccaggccatcagggcccaaccacccctaaacaaatgggttctcggcccctcgtggctggaggtgggttctctcaccattcccagcctaaggctccatccccatgctggcagctgttcaaccatgtctagagagatccactgtcccagacagcacctcagggtcccccgtcctgcctggaaccctgtaggaaactccacaaaccgccgccattctgtccacacccctacaggagccccaaccctctccccacatccaggcttccctcccagacccctcatccctgcccgcacggtgcctgagggggccttcttgggcagcgcctaagcaagcccccagcacccttcggccccttcaaggcacacaggccccctttccacccagcctcaggaaaccacctgtgtcctccaacgacaggtcccagcctcccagcctttgccttgcctgttcctctccctggaactctgccccgacacagaccctccccagcaagcccgcaggggcacctcccctgcccccagacaccctgtgcccgtcagttcatccccagcagaggccctcaccaggcacacccccatgctcacacctggccgcaggcctcagcctccctgagggccccacccagcccgcgtctggccagtggtgcgtgcaaagcccctcacccagactcggcggaaggcagccagtgcaggcctggggaggggctctccttagaccaccttgcaccttccctggcacccaccatgggaagagctgagactcactgaggaccagctgaggctcagagaagggacccagcactggtggacacgcagggagcccacgccagggcgccgtggtgagtgaggcccagtgccacccactgaggcctcccgttcagtgggacgacggtgaacaggtggaaccaaccaggcaacccccgccgggccccacagacgggatcagagcaggaaaggcttcctgcccctgcaggccagcgaggagccctggcgggggccatggccctccaggcgaggaggctcccctggccaccgccacccgggcctctctgctgctgggaaaacaagtcagaaagcaagtggatgagaggtggcgtgacagacccagcttcagatctgctctaatttacaaaagaaaaggaaaaacacacttggcagccttcagcactctaatgattcttaacagcagcaaattattggcacaagactccagagtgactggcagggttgagggctggggtctcccgcgtgttttggggctaacagcggaagggagagcactggcaaaggtgctgggggcccctggacccgacccgccctggagaccgcagccacatcagcccccagccccacaggccccctaccagccgcagggttttggctgagctgagaaccactgtgctaactggggacacagtgattggcagctctacaaaaaccatgctcccccgggaccccgggctgtgggtttctgtagcccctggctcagggctgactcaccgtggctgaatacttccagcactggggccagggcaccctggtcaccgtctcctcaggtgagtctgctgtctggggatagcggggagccaggtgtactgggccaggcaagggctttggcttcagacttggggacaggtgctcagcaaaggaggtcggcaggagggcggagggtgtgtttttgtatgggagaagcaggagggcagaggctgtgctactggtacttcgatctctggggccgtggcaccctggtcactgtctcctcaggtgagtcccactgcagccccctcccagtcttctctgtccaggcaccaggccaggtatctggggtctgcagccggcctgggtctggcctgaggccacaccagctgccatccctggggtctccgccatgggctgcatgccagagccctgctgtcacttagccctggggccagctggagcccccaaggacaggcagggaccccgctgggcttcagccccgtcagggaccctccacaggtagcaagcaggccgagggcagggacgggaaggagaagttgtgggcagagcctgggctggggctgggcgctggctgttcatgtgccggggaccaggcctgcgctttagtgtggctacaagtgcttggagcactggggccagggcagcccggccaccgtctccctgggaacgtcacccctccctgcctgggtctcagcccgggggtctgtgtggctggggacagggacgccggctgcctctgctctgtgcttgggccatgtgacccattcgagtgtcctgcacgggcacaggtttatgtctgggcaggaacagggactgtgtccctgtgtgatgcttttgatatctggggccaagggacaatggtcaccgtctcttcaggtaagatggctttccttctgcctcctttctctgggcccagcgtcctctgtcctggagctgggagataatgtccgggggctccttggtctgcgctgggccatgtggggccctccggggctccttctccggctgtttgggaccacgttcagcagaaggcctttctttgggaactgggactctgctgctggggcaaagggtgggcagagtcatgcttgtgctggggacaaaatgaccttgggacacggggctggctgccacggccggcccgggacagtcggagagtcaggtttttgtgcaccccttaatggggcctcccacaatgtgactactttgactactggggccagggaaccctggtcaccgtctcctcaggtgagtcctcacaacctctctcctgctttaactctgaagggttttgctgcatttttggggggaaataagcgtgctgggtctcctgccaagagagccccggagcagcctggggggctcaggaggatgccctgaggcaacagcggccacacagacgaggggcaagggctccagatgctccttcctcctgagcccagcagcacgggtctctctgtggccagggccaccctgggcctctggggtccaatgtccaacaacccccgggccctccccgggctcagtctgagagggtcccagggacttagcggggtgccagttcttgcctggggtcctggcattgttgtcacaatgtgacaactggttcgacccctggggccagggaaccctggtcaccgtctcctcaggtgagtcctcaccaccccctctctgagtccacttagggagactcagcttgccagggtctcagggtcagagtcttggaggcattttggaggtcaggaaagaaagctggggagagggacccttcgaatgggaacccagcctgtcctccccaagtccggccacagatgtcggcagctggggggctccttcggctggtctggggtgacctctctccgcttcacctggagcattctcaggggctgtcgtgatgattgcgtggtgggactctgtcccgctccaaggcacccgctctctgggacgggtgccccccggggtttttggactcctgggggtgacttagcagccgtctgcttgcagttggacttcccaggccgacagtggtctggcttctgaggggtcaggccagaatgtggggtacgtgggaggccagcagagggttccatgagaagggcaggacagggccacggacagtcagcttccatgtgacgcccggagacagaaggtctctgggtggctgggtttttgtggggtgaggatggacattctgccattgtgattactactactactactacatggacgtctggggcaaagggaccacggtcaccgtctcctcaggtaagaatggccactctagggcctttgttttctgctactgcctgtggggtttcctgagcattgcaggttggtcctcggggcatgttccgaggggacctgggcggactggccaggaggggatgggcactggggtgccttgaggatctgggagcctctgtggattttccgatgcctttggaaaatgggactcaggttgggtgcgtctgatggagtaactgagcctgggggcttggggagccacatttggacgagatgcctgaacaaaccaggggtcttagtgatggctgaggaatgtgtctcaggagcggtgtctgtaggactgcaagatcgctgcacagcagcgaatcgtgaaatattttctttagaattatgaggtgcgctgtgtgtcaacctgcatcttaaattctttattggctggaaagagaactgtcggagtgggtgaatccagccaggagggacgcgtagccccggtcttgatgagagcagggttgggggcaggggtagcccagaaacggtggctgccgtcctgacaggggcttagggaggctccaggacctcagtgccttgaagctggtttccatgagaaaaggattgtttatcttaggaggcatgcttactgttaaaagacaggatatgtttgaagtggcttctgagaaaaatggttaagaaaattatgacttaaaaatgtgagagattttcaagtatattaatttttttaactgtccaagtatttgaaattcttatcatttgattaacacccatgagtgatatgtgtctggaattgaggccaaagcaagctcagctaagaaatactagcacagtgctgtcggccccgatgcgggactgcgttttgaccatcataaatcaagtttatttttttaattaattgagcgaagctggaagcagatgatgaattagagtcaagatggctgcatgggggtctccggcacccacagcaggtggcaggaagcaggtcaccgcgagagtctattttaggaagcaaaaaaacacaattggtaaatttatcacttctggttgtgaagaggtggttttgcccaggcccagatctgaaagtgctctactgagcaaaacaacacctggacaatttgcgtttctaaaataaggcgaggctgaccgaaactgaaaaggctttttttaactatctgaatttcatttccaatcttagcttatcaactgctagtttgtgcaaacagcatatcaacttctaaactgcattcatttttaaagtaagatgtttaagaaattaaacagtcttagggagagtttatgactgtattcaaaaagttttttaaattagcttgttatcccttcatgtgataattaatctcaaatactttttcgatacctcagagcattattttcataatgactgtgttcacaatctttttaggttaactcgttttctctttgtgattaaggagaaacactttgatattctgatagagtggccttcattttagtatttttcaagaccacttttcaactactcactttaggataagttttaggtaaaatgtgcatcattatcctgaattatttcagttaagcatgttagttggtggcataagagaaaactcaatcagatagtgctgaagacaggactgtggagacaccttagaaggacagattctgttccgaatcaccgatgcggcgtcagcaggactggcctagcggaggctctgggagggtggctgccaggcccggcctgggctttgggtctccccggactacccagagctgggatgcgtggcttctgctgccgggccgactggctgctcaggccccagcccttgttaatggacttggaggaatgattccatgccaaagctttgcaaggctcgcagtgaccaggcgcccgacatggtaagagacaggcagccgccgctgctgcatttgcttctcttaaaactttgtatttgacgtcttatttccactagaaggggaactggtcttaattgcttgatgaagagcaggagactcatttatgtgagtcttttgagtgaccattgtctgggtcactcccatttaactttccctaaagcccatttgaaggagaggtcgcacgagctgctccacaacctctgaatggggatggcatgggtaatgatgcttgagaacataccaagccccactggcatcgcccttgtctaagtcattgactgtaggtcatcatcgcacccttgaaagtagcccatgccttccaaagcgatttatggtaaatggcagaattttaagtggcaaattcagataaaatgcatttcttggttgtttccaatgatgactgttatctagagggaatttaaaggcaggggtttactgcagactcagaagggaggggatgctccgggaaggtggaggctctgagcatctcaataccctcctcttggtgcagaagatatgctgccacttctagagcaaggggacctgctcatttttatcacagcacaggctcctaaattcttggtctcattctcaagatgttttaatgactttaaagcagcaaagaaatattccacccaggtagtggagggtggtaatgattggtaatgctttggaaccaaaacccaggtggcgctggggcaggactgcagggaactggggtatcaagtagagggagacaaaagatggaagccagcctggctgtgcaggaacccggcaatgagatggctttagctgagacaagcaggtctggtgggctgaccatttctggccatgacaactccatccagctttcagaaatggactcagatgggcaaaactgacctaagctgacctagactaaacaaggctgaactgggctgagctgagctgaactgggctgagttgaactgggttgagctgagctgagctgagctgggctaagttgcaccaggtgagctgagctgagctgggcttggctgcactaagctgggctgagctgggctgagctgggcagggctgggctgagctgagctgggctgggctgagctgggctgggctgggctgggctgagcgggtctgagcggggctgagctgagctaggctgggctgggctgagctgggctgagctgggctgagctgggctgagcaaggctaggctgagctgggctgagctgagctgggctgagcaaggctaggctgagctgagctgagctgggctgcgctgagctgggctgggctgcgctgagctgggctgggctgagctgggctaggctgggctgagctgggctgagctaggctgggctgggctgggctgagcggggctgagcggggctgagctgagctaggctgggctgagcggggctgagctgagctaggctgggctgggctgggctgagccaagctgaaccgggttgagcgtgctgtgctgggctgagccaagctaggctgagctgagccaagttgagcttagctgggctgagctaacctgggcagggctgagctgggctgagctaacctggactggggctgagctaacctgggcagagctgagctgggctgagctaacctgggctggggctgagctaacctgggctgggctcagctgagctgagctacgctgggctgggctgggctgagccgagctgaactgggctgagcaggctgtgtcgggctgagccaagctgggccgagctcagcagagctgagccgagctgagcttagctgggctgagctaaccagggctgggctgagctgggctgagctgagctgagctgaactgggctgaacgggctgaggcgagcagggccgagctgagcagagctaagccgaggctgggctgggctaacctgggctgggccgagctgagcagagctaagccgaggctgggctgggctaacctgggctgggctgagctgagctgggttgggcagggctgggctgggctgagctaagctgaactagggtgagctgggccgagccaggctggtttgggctgagttgagctgacctggactggggctgagctaacctgggctgggctcagctgagctgagctacgctgggctgggctgggctgagccgagctgaactgggctgagcaggttgtatcaggctaagccaagctgggccaagctcagcagagccgagccgagctgagcttagctgggctgagctaaccagggctgggctgagctgggctgagctgagctgagctgaactgggctgaacgggctgaggcgagcagggccgagctgagcagagctaagccgaggctgggctgggctaacctgggctgggctgagctgagctgggttgggcaaggctgggctgggttgagttgggctgagctaagctgagctagggtgagctgggctgagccaggctggattgggctgagttgagctgacctcaactgagctgacctaggctgagctgagctgagctgaagtaggctgtgctgggctgagctgggatgacctgggctgggctgagctgatttgggctgggttgagcagacctgggctgagccgggttgagctgagctgaaccaggatgagctgggctgagctgagctgggctgggtggtccaggctgggctgacctggaccaggctgggccaggttgagctgggctaagccgagctgagctgagctgagctgggatgatctgggctgggctgggctgggctgagctgacctgggctgggctgggctgagctgagctgagctgagttaagctgagctgagctgaactgggctgtgctgagctaggctgggctgggctgagctgggctgggctgggctgagccagattgtgcctggctgaactgagctgggctaagctgagctgggctgagctgggctgagctgagctgggctgagtggggcggggctgagctgagccggactgggctgggctgggctcagctgagctgagctgaactgggctgggctgaactgggctgggctgagctgagctgaactgggctgggctgaactgggctgggctgagctgagcttggatgagctgggctgaactgggctgggttgagctgggctgggctgagttgagccagactgatctgggctgagccgagctgggttaagccgagctgggttgggctgggctgggttgggctgggctgagccggactgggttgggctgagctgagctggactgggctgagctgagctggtctgggctggctgagctgagctgtgttgagccaagctaggctgggctgggctgagctgggctgaactgggctgagcggagctgagctgagctgggctgggttgagcagagctgggggctgagctgggctgggctgggctgagttaagctgggctgacctgggctgagttaagctgggctgacctgggctgagctaagctgggttgagccgatccgggctgggctgggctgggctgagccaggctaggttgagctgggctgggctgggctctgctgtgctgtgctgaacagggctgagctgaactgagctgagctgggctgagctgggctctgctgtgctgtgctgagcagggctgagctgaactgtgctgagctgggttgagctaagctaggctgggctgggctgagctgggatgagctgggctgggctgggctgggctctgctgtgctgtgctgaacagggctgagctgaactgagctgagctgggctgagctgagctctgctgtgctgtgctgagcagggctgagctgaactgggctgagctgggctgagccgggctgagttgagcagagctgggttgagcagagctgggctgggctgggctgagttgagccaggctgacctgggctgagccaagctgggttgagccaaactgggctgggctgggctgagccaggctggattgagctgggctgggctgggctaagctgggctgtgctgcactgagctgggctgagctgggttgaactgtgctgagctgagctgggctgtgctgaactatgcttagctgggctgggctatactgggcttagctgggctgggctaaactgggcttagctgggctgggctatactgggcttagctgggctgggctatactgggcttagctgggctgggctatactgggcttagctgggctgggctgagctgagatggtcttaggtggtctgagctcagctaggctgggctgagctggtctgagctcatctgagttgggctgagctgagcttggctttgctgagctggggtggggtgggctgggctggattgagctggcctgggctgggatgaactggattgagctggcctgggctgggatgaactggaggacatggcactgggccaatcttcatgatcttgttggacatagatggatagcctcagctgagtctacactgcgttccccatcacactcaccctccctatactcactcccaggcctgggttgtctgcctggggagacttcagggtagctggagtgtgactgagctgggggcagcagaagctgggctggagggactctattggctgcctgcggggtgtgtggctccaggcttcacattcaggtatgcaacctgggccctccagctgcatgtgctgggagctgagtgtgtgcagcacctacgtgctgatgcctcgggggaaagcaggcctggtccacccaaacctgagccctcagccattctgagcagggagccaggggcagtcaggcctcagagtgcagcagggcagccagctgaatggtggcagggatggctcagcctgctccaggagaccccaggtctgtccaggtgttcagtgctgggccctgcagcaggatgggctgaggcctgcagccccagcagccttggacaaagacctgaggcctcaccacggccccgccacccctgatagccatgacagtctgggctttggaggcctgcaggtgggctcggccttggtggggcagccacagcgggacgcaagtagtgagggcactcagaacgccactcagccccgacaggcagggcacgaggaggcagctcctcaccctccctttctcttttgtcctgcgggtcctcagggagtgcatccgccccaacccttttccccctcgtctcctgtgagaattccccgtcggatacgagcagcgtggccgttggctgcctcgcacaggacttccttcccgactccatcactttctcctggaaatacaagaacaactctgacatcagcagcacccggggcttcccatcagtcctgagagggggcaagtacgcagccacctcacaggtgctgctgccttccaaggacgtcatgcagggcacagacgaacacgtggtgtgcaaagtccagcaccccaacggcaacaaagaaaagaacgtgcctcttccaggtgagggccgggcccagccaccgggacagagagggagccgaagggggcgggagtggcgggcaccgggctgacacgtgtccctcactgcagtgattgctgagctgcctcccaaagtgagcgtcttcgtcccaccccgcgacggcttcttcggcaacccccgcaagtccaagctcatctgccaggccacgggtttcagtccccggcagattcaggtgtcctggctgcgcgaggggaagcaggtggggtctggcgtcaccacggaccaggtgcaggctgaggccaaagagtctgggcccacgacctacaaggtgaccagcacactgaccatcaaagagagcgactggctcggccagagcatgttcacctgccgcgtggatcacaggggcctgaccttccagcagaatgcgtcctccatgtgtgtccccggtgagtgacctgtccccaggggcagcacccaccgacacacaggggtccactcgggtctggcattcgccaccccggatgcagccatctactccctgagccttggcttcccagagcggccaagggcaggggctcgggcggcaggacccctgggctcggcagaggcagttgctactctttgggtgggaaccatgcctccgcccacatccacacctgccccacctctgactcccttctcttgactccagatcaagacacagccatccgggtcttcgccatccccccatcctttgccagcatcttcctcaccaagtccaccaagttgacctgcctggtcacagacctgaccacctatgacagcgtgaccatctcctggacccgccagaatggcgaagctgtgaaaacccacaccaacatctccgagagccaccccaatgccactttcagcgccgtgggtgaggccagcatctgcgaggatgactggaattccggggagaggttcacgtgcaccgtgacccacacagacctgccctcgccactgaagcagaccatctcccggcccaagggtaggccccactcttgcccctcttcctgcactccctgggacctcccttggcctctggggcatggtggaaagcacccctcactcccccgttgtctgggcaactggggaaaaggggactcaaccccagcccacaggctggtccccccactgccccgccctcaccaccatctctgttcacaggggtggccctgcacaggcccgatgtctacttgctgccaccagcccgggagcagctgaacctgcgggagtcggccaccatcacgtgcctggtgacgggcttctctcccgcggacgtcttcgtgcagtggatgcagagggggcagcccttgtccccggagaagtatgtgaccagcgccccaatgcctgagccccaggccccaggccggtacttcgcccacagcatcctgaccgtgtccgaagaggaatggaacacgggggagacctacacctgcgtggtggcccatgaggccctgcccaacagggtcaccgagaggaccgtggacaagtccaccggtaaacccaccctgtacaacgtgtccctggtcatgtccgacacagctggcacctgctactgaccctgctggcctgcccacaggctcggggcggctggccgctctgtgtgtgcatgcaaactaaccgtgtcaacggggtgagatgttgcatcttataaaattagaaataaaaagatccattcaaaagatactggtcctgagtgcacgatgctctggcctactggggcggcggctgtgctgcacccaccctgcgcctcccctgcagaacaccttcctccacagcccccacccctgcctcacccacctgcgtgcctcagtggcttctagaaacccctgaattccctgcagctgctcacagcaggctgacctcagacttgccattcctcctactgcttccagaaagaaagctgaaagcaaggccacacgtatacaggcagcacacaggcatgtgtggatacacatggacagacacggacacacacaaacacatggacacacagagacgtgctaacccatgggcacacacatacacagacatggacccacacacaaacatatgtggacacacatgtacaaacatgcacaggcacacaaagagaacactgactacaggcacacacacacacgggcacacacatggatatgtgcacacatggacacatacatgtgcaggacatgcacacacacagacacactagcacagaggcatacacacacagacacacacattcacaaacacacatgtgcatgcaaacacacacacatgtacagacacaagtacatggacacatgcacacccagagacacactgacacagacacacaggagcatgtgatacactaacacgtggacacacacgtctacccacaggcacacaacagatggacacgcgtacacagacatgcacacacccacaggcacaacacgtgcgcatgccggccggcccccgccaacattctcccagggccctgccggatactctgtccctgcagcagtttgctccctgcgctgtgctggcaccggggctttgggcccaggctctgcttgtccttctgtctctgcttggaggtgctgccatggcacccagcttgtgctctgcctggggagcggaggccccagggatagcatgtgacccctgctgaggccaggctcctgatgaaggcagcagatagcccccacacccaccggtgagcagaaccagagcctgtgccatgtgctgagagcaggcagtgactaagcatatgggcccagagggcagagtggctgccctgggcagctgctcctcttagcaggaggcctcaggagatgagctagagcaagtctgcccctgcaaataccacctgctccccaacccacagcagggagcaggcgaggtcagacagcagcagcccgggaaggaccgagccccagcagggaaggcagggcccgagtgaggtctccacacccaacgcacagtgctgtctctaactggggccacctccgagtccccgccacactcttggccctttggagtcctgggctccaggtgtctcccaagggcccatctgtgcaggggatgcaaccccccgaatgtcctcatcccactgtggagctcaggtctctgtctgctccctgggtcctggcagggtaggacaagtccgccaggatgtccccatgcagactctgctccaagagggagctggagagtcagggccttggtgagggagtcaggatcgggttccccccagctcagtcctcccacctgccagcccccacagcacagggcagggccacaccccctgcttccccctccaggagagtcaggacatgctggccgctgctccgctggggccccgccctccagcccccaccttggtctgtgtgctgcatcccccacgctctctctgccaccccaggactctgaggaaaagacctcagagtcccagccctgcccagtctcggcctgtgcccccgctgcatcaggctttcaggggcccagcccatgccctgggcagtgcccgagcccccctgcacttgctctccccacccctgggtgcagcacagcctaggggccaagggtgggcctagaggatgggccccgggggggctttgctgggtgccaccccagcctgaccctattcccccgtgctgtgtctcctgcagagggggaggtgagcgccgacgaggagggctttgagaacctgtgggccaccgcctccaccttcatcgtcctcttcctcctgagcctcttctacagtaccaccgtcaccttgttcaaggtagcacggctgtggcacagggaggagggtgcagggcgagtgtggggcccagggagcagcctgggctggacgtctagcccggaggcccccacaccaccccactgggtcatctctgccccggctcccttcccgaccacggggaaagcatttcacactgtctctgttgcctgtaggtgaaatgatcccaacagaagaacatcggagaccagagagaggaactcaaaggggcgctgcctccgggtctggggtcctggcctgcgtggcctgttggcacgtgtttctcttccccgcccggcctccagttgtgtgctctcacacaggcttccttctcgaccggcaggggctggctggcttgcaggccacgaggtgggctctaccccacactgctttgctgtgtatacgcttgttgccctgaaataaatatgcacattttatccatgaaactgctttctggtgagggtttttgtttctttttcaaaactttcctgctacatgggcatctcaagggggaccccagttccaaagggagctgtggaaaagagcgctgggtcagccagcgcagggggtttcgaggaaagccacgtgcccaggaaaggggccgcagaagcaggtgggccagactcagactcggggcatgcccagcctgatggaaggaaggggactgagcaggagagggttccaggcctggtcctccaagcacagcctgaattgagagactggggctcaggcctcgggggcctctgtgtgtgctccacatgcctacaactgcccgggtcaccttgccacccttcccagcaagcccagacagttcttggccttgccccaaaccttcatgatgtgtggtgcacgccaccgggatccaggaggtgcaggctgagccctcgagagcatgtgggcctcaccgggatccaggaggtgcaggctgagccctcgagagcatgtgggcctgtctgcacagtgtgggggccttgcactccacaggagcacaggggtggggtagcagtcgcgcccgtggcaggggagtggaagttggagcaaaagtttcaggtgaacgagtgtcttagtctaattgggcagctatcacaaaacactatcggctgcaaagcttgagcaacagacatttgcctcccacagcgctggaggctgaaagtctaagatcaaggcgccggcaacttcaacgtctggcgagggccaattcccagctcagagacgcgcctcctcactgcatcctcgcgcagccgaagatggtgaaggagctctcagggtctctgtcatacaggcactaagcccgtcacgagggtctctctcatacaggcactaagcccgtcacgagggtctctctcatacaggcactaagcccgtcacgagggtctctctcatacaggcactaagcccgtcacgagggtctctctcatacaggcactaagcccgtcacgagggtctctctcatacaggcactaagcccgtcacgagggtctctctcatacaggcactaagcccgtcacgagggtctctctcatacaggcactaagcccgtcacgagggtctctctcatacaggcactaagcccgtcacgagggtctctctcatacaggcactaagcccgtcacgaggtcctcatcattgcccagatgctagggctcccagtgccatccccttgtggatgaggatggggggcgtgaccatgtcgtccttagaagccgttagggaatgcatagtggggaggacaagtctctgccatcaccctgaagatgggcaggtggtggccaggcttggggcagtgccgaaaaatgactccccaggtaggtgggagcaggatcaaagagcaggggattttttcagagatggcagccaagccaaagttgggggctcatgccaggaggctcacttggccatggtgcagtcacccaggggtgacccacagtccatggcaaagtcaaggacagcagtggctgtgagaccagggtggaggcaggtggctggggggagaggaccaggctggaaggactgggcagaccccaaggccatagaagtgtcctagaggaagcatccaggatggcgtcttgggagggctcataagctgggggcccagaaggaggacatttcaggttctgaggagcagcctggcacttgctctgagccagctgtcatgggtatctgggggctgctgggtacaagttgtgtccctcccactaaatgtgctctccacatggacccggcccgcccttctgtccctgctggatccctgagctggcaccagccctgccctcagagacaatgtccaggagacaggtggaggtgcacgtgtgggtccctggggaaatccatcctccaaccgtgggctccgagtcgcctcccagcctctcgctccagcttcaccccatgtagctcatcacaggctcaacctcccagcctgggggaggatggagtgaggagccccacactgcccagggcacacccagggggctggggagtctgcactgggctggggcagggaggcctcgtgcagcctgtggggctggcagctcaggacaacactcgtatccgttaactgtggccctggcaacactgcaccccagactgcgtggcttaaacaacagacgtttattccgtcctggttctggaggccgggcatctgggatggaggccttggcggggctggctcctctgtgtcacgggagactctgttccaggctctctccctgctgctgggctttgccggccgtctctggtgctcttggcttatggaagcagcaccatcttcacagggcgttctccacacgtgctgtctgtgcccagattcccccttttcatgaggacagcagtcatattggatcagaggcttgccctactccagggtgacctcatctgaacttgattgcagctgcaaagactgtttccagacaaggtcacattctgtggtcctgggggttaggacttcgacacattaatttacaggggacacattttaacccatgacagtttgccctccgttccccccataatcatgtccttctcacaggcaaaatccctgcatcccatagcaacatctccagaacggctgaccccttccagcaccaactcttagtccacaatctcagcgaaatatcacctgcatcaagtgtgggagaaacccagggtgagattcattctgggtgaaattcctctccatctgtggacctttgtaacttgacaagaagttatctgcttccaaagtacaatgatggggcaggcataggatggacattcctattctaaaagggatacatagaaagggagagaggagccatgggtcccaagcaagcccaaacccagcagggaaagctgcattagatttaaggctcaaggctcatcctcctgggtccgtgctccatcttccaggcccactggggtgaccccatgctcttcgcccatggtggccagagcccccacagcctcctcatctttggctctgatctcaaagtcacccttccttcattttttctggtcttctttcccttccatccaattggcattgtttcttctgttttacaattcacaaaatccttgtcagcttcccatgaaattcctgggggtttgagtcatcagacaagagagccctgcacagttatatcctcaataaccttatctctactcctggtttctgctgagatggttgattggatccataagtcatgattccaatctctttaacaaatggttgcccagacacatccttggccttgtttccagagcatgctattggacaggctgagaattttccagctgttcaagttgtgggtcctgtttactgaacactttctctcactttttactataagcagtcaggagaaatcaggttgtgccttcaacacttttcttagaaatatcctcagctaaaatccaggttcatcacttgtaagtcctacttaccataaatagaatgcaattcagccaagtgctttgccactttctaacaaaggtcacctttcctccaattttcaataacatcttcctcatttctgtctggggcctcaccagaggcatctttaacattcacatttctagcaacattctgtttgtgacaatttatgtattctctaagatgacaggagttttctctatagctctcctctttctttctgagcccccaccaggatcaccttcaatgtccaaatttctaccatagtcttcaaggaaatctaggctttttctaacatgcacctgaaaactcttctcacctctacacattaccctatcccaaattcatttccacagttttaggtatcaattaaatcagataaataaatcattaccctgaattatttcagttaagcatgttagttggtggcataagagaaaactcagtcagatagtgctgaagacaggactgtggagacaccttagaaggacagattctgttcagaatcactgatgcggcgtcagcaggactggcctagtggaggctctgggagggtggctgccaggcccggcctgggctttgggtctccccggactacccggagctgggatgcgtggcttctgccgccgggccgactggctgctcaggccccagcccttgttaatggacttggaggaatgattccatgccaaagcttttgcaaggttcgcagtgaccaggcacccgacatggtaagagacaggcagccgccgctgctgcattcacttctcttaaaactttgtatttgatgtcttatttccactagaaggcgaattggtcttaattgcttctcttaagccaccacttctaaagccaaaatctgttttagtttcttatgagctattgtaacaaagtaccacaactgcatggctgaaacaacagaagtgtattctgtctcatttctggaggccaggtgtctgagatcaagctgtgggcagggttggctcccctgggttggcagggagaatctgttccaggtgtctgtcctggcttttgttggtttgctggaaagctttggtgttccttggcttttggaaacagctcctccgcctccatctttaccttcacatggcattctgcctgcgtgcatgtctgtgtctaaatttccactttgcataaggacaccagccatattgggtcagaggctcacctgcctccagcgtgacctcatcttaacttgattgcatctgcaaaactctgcttccaaagaagggcacattctgaggccctacgggtcagagcttcaacacgtccatttatttggagacacaactcaacccataacaagacccatccctagtgtctcaccagtggtgctgtagagggaggcctggcagggctgacatcccagaacctcagggaaaaatgaaaacagcccagaggggtccaagaggtggctcgaggaagggaattaggaacacactgttcaggtggaagattctgagatgggccgtgaatactgcctaggatgtggagggttgacaatgggttgacaatcctgctcagaaaatcccaggataaaggatgtaaatggggagaagaggagggtcatccagaatttgggaaagcagggcgacagtttctgccccaagggagaagggaaggaggatggggccaccgccacaccagatgaccttgcgtaccaggccaaagaacgggaacacctggccccacctgagcagcaatagtcagtgtggtggtgggcagacatgggtggaggcagggggtgagtagaaggttagactaagacggagcacctggggcctccagggacccaggcaagaaccctgcacttgctcagctgccctgggtacccaggtctccaggaaagtgaggctgagagccaagcccagcaggcagccacacattctgggacctgccaccctacagcctgctgtccatgagtaacaccccttacaaggggccaggtcagctcatgggtttatcccaggcagcagagcccctggggccaggaatcagggagaggagcatccaatcccaccagctcctccggagccactcagagggccagacgcatggccctccacagggaccccatggcccctgcagggcagctgaggacccgtggctgggagcctgggcaggagggtcatacagccctaggcccgttgctcccaggcttgagtgcccctcctcccctcaggggcccaagggaagtgggttccagagaggttgggggcagcagggaaggtggaggtcccaggaatgcccagaggggcaccaaagcctctggagggaagacccctcccttccaggagctctcggcaacaagagcccagggtccacaaagccacaggtcccactcggttattctgactcacaacacaggagcggcagcaggggcattcgtgttcacgggccacttggtcagccccgctcaccctgggcactcctcctgggccccttttccctgccttccctgtcaccctgctgccagggtcctctgccctgccctgccccttgtcctcagagcctccagcctcagactcccactgtgtctgtcttccagcacccaccaaggctccggatgtgttccccatcatatcagggtgcagacacccaaaggataacagccctgtggtcctggcatgcttgataactgggtaccacccaacgtccgtgactgtcacctggtacatggggacacagagccagccccagagaaccttccctgagatacaaagacgggacagctactacatgacaagcagccagctctccacccccctccagcagtggcgccaaggcgagtacaaatgcgtggtccagcacaccgccagcaagagtaagaaggagatcttccgctggccaggtaggtcgcaccggagatcacccagaagggccccccaggacccccagcaccttccactcagggcctgaccacaaagacagaagcaagggctgggctgtgaggcaacccccacctccccctcagagcacgttcctcccccttcaccctgtatccacccctccggaccctccccatctcagtccctccgctccctctctctgaggcccatctcccaatacccagatcactttccttccagacccttccctcagtgtgcacggaggcagcttgcccagcaaaggtgactgtctagtgggcttcccacagccaagctcccaccccatgctgcggcccctcccttcttcctgcttggctgcctgtgccccccacctgcctgtccacaacccagcctctggtacatccatgccctctgccctcagcctcacctgcacttttccttggatttcagagtctccaaaggcacaggcctcctcagtgcccactgcacaaccccaagcagagggcagcctcgccaaggcaaccacagccccagccaccacccgtaacacaggtgagaagccccttccctgcacactccacccccacccacctgctcattcctcagccgcctcctccaggcagcccttcataactccttgtctgagtctccaagtcacactttggtaaggagagggacactgaacggacctctaacaaacacctactgccagccagccccagtctgggggccagcagatgccaaacaaccagcagactcccagagcagacctgggccggctccctggcccatggacccagctctgcctcgctgagctgaggcatgggctctcagcgcagcctcacatagagccaccctgccgaggcagtccggcttgcagactcacaggtcacttgggccgcagcagcccctccccgtgaccctcgcctcccgcccgccccagcctggctctctccaagtgttggatcttggtggccagcctgcttctcaccctcaccctgcctgccacctcagaatggcaggggaaagagggccctcaccaagaactttatctgagaagtctgaggcttgtgactctgacctgcctgagatgtccatgtggccggggggacgggttcagtgttcgggagaactcgggtacgtgcctgactttctctgagtagggcaggaagctgttaggagaagcagcagtgaggtgggctggaccaacaggcagaatgactgtccctcagccaccctctgggatgtgggtcaagctctgacaaaggcatggcacagccatggtggcccctgcttggatgagtggccacggtgccctcaccctgggccagaatctgcctccactctgcaggtgcagaaacacgacattcccgtctctaaacacacctagctcctaggcttggggtgggcctatcaaatgcagggagatggacacagcacaagggccagagcttcccatgagaaaggtgagggcagctgctccctgacccgggcatctgcacttgtccctctccaccctcctcatgggcagtggagactcagcaacaaaacaagttgagtgcattagcagccagctctggagccaagtcactcaccccacggccttggctgctggtggaggggccttcccctgggcagcctccaagaagacagccaagtgctcttactcagaccacggcgctgcttcctggcacctcgatttcccacaacaacatggggtgcagacaggctagggccccctgccctggggcctggacggcatccagttaaagatgacccttcacgggcggtgcctgaggtgtgctgacctcagcagctaagccctcaggtctggtctgcactgccccacctggaggacccaactgacccagacacagccagggttatggcatgaccccgtggacggtgacccacaggccagatgcagccgggggctgttttgtgtggcctagaaatgtctttacagttgtagtgggatggaggaggaagaggaagagaggaggggagaggaaagcagggaaggggaaaaagaggagttcaatgcaaccccaaaagccagaacagttttgagctgaaagaacaaggcaggaaacatcccagtacctgacttcaaaacatactataaagcagttgtaatcaaaacaggatcataaaaacagacacacagacccatggaacagaaaagcgagcccagaaataaatctacatgcttgcagtccattgattttcaacaaaggcaccaggaaaacacaatggggagaggacagtttcctcaataaatagtgctggggaaactggatatccatgtgcagactaatgaaactacacaaaaatcaattgaaaacagtctaggccaggcgcggtggctcatgccggtaatcccagcactttgggaggccgagacaggcggatcacctgaggtcaggagttcgagaccagcttggccaacatggcgaaacccggtctccactaaaaatacaaaaattagcacatggtggcctacgtctgttatcccagcttttcaggaggctgaggcaggagaatcgcttgaatccgggaggtgaaggttgcagggagccaagattgcgccactgcattccagcctgggcaatggagcgagactgtctcaaaaaaaaaaaaaaaaaaaagaaaagaaaacagtctaaaggtttaactgaacagataaagctactagaagaaaacatagggggaaaactccatgacattagtctgagcaacgatttttggatatgatcccaaaagctcaggcagcactagtcacaaaagccaagatacagaaccaacctaagcacccctcagcagatgcacaggtaaagaaaatgtggtacgtatggggcacaatggaatacgattcagcctttaaaaacagtgaaattctgtcattggcaacaatgtagatgaacctgaaggacacttatgctaagtgaaataagccaggcacagaaggagcaatactgcatgattgcacttacatctggcaggttaaaaaggcaaactcttagaggcagacagtagagaggtggtgccagggagcgggcactggtggctggggagatgttggtcaaagggcacaaaactgcagttgggaggaattagttcaggacatcccttgtacatggggacagtggttagtaacaacggattgtatccttgaaaaccgctaagaaaatagtttttaagtgttcttgacacaaaaagtgacacgtatgtgagatactgcatggtcattagctggatttagccattccacaatgtacacatatttcaaacattgtgttgtatatgataaacatgtataatttttgtcaattaaaaatttttaggaagaggaggagaagagaagaagaaggagaaggagaaagaggaacaagaagagagagagacaaagacaccaggttttttctgacccctgggctatcaaaacacctattgcccaataactagttggccgttggtgccctaaactattgaagcgattgctgttatgtggatgggccccggacacttagaaactcgtgacccctgaggacccccacgaggacagtcagggtccccccgaactcagggagcactgaggaaggagctcttagaggcgtggggcccctcaggcccctcagagggctctgccacatgggtcaggggcaggctgagggggagtcccaggctccatgcccagcctctgtgcctctgaccagggtgtcccccacaccgcctcctccccagtgccctccactggccacacctggccagaagctggggagaggagagcacagtggttaagtcagtccctgcagggagacggcaccagaaaaacctggcctgtggatgagtcccggcctggcagccacagagcagagagctctggaagcaacgaaggcccgagtctgctcagggaagagcgggcagcagccccagggccggacagtgaccaagagtggcaccgcccatggctcaacgggtctttgcccacagatcccccagcccctggagacagggtctgtgtgcctggccgtgcaggcaggcaccacactcagggggaggccactgtggagctctgtgcagagccccgggcgggagcctactgctcccgaaggtccggccacagctgctctcgtttgctctcccctgcagagtgtccgagccacacccagcctcttggcgtctacctgctaacccctgcagtgcaggacctgtggctccgggacaaagccaccttcacctgcttcgtggtgggcagtgacctgaaggatgctcacctgacctgggaggtggctgggaaggtccccacagggggcgtggaggaagggctgctggagcggcacagcaacggctcccagagccagcacagccgtctgaccctgcccaggtccttgtggaacgcggggacctccgtcacctgcacactgaaccatcccagcctcccaccccagaggttgatggcgctgagagaacccggtgagcctggctcccaggtggggagacgagggtgcccacagcctgctgacccctacgcctgccccagggccatgaccccagctgggccccagcagcaccggtcatcctccacaggaaaggagaagggaggcaccagcaccctggccggccccacttctctcccagtgcccccgtggccagagcctgacagcctcccccacctccccgcagctgcgcaggcacccgtcaagctttccctgaacctgctggcctcgtctgaccctcccgaggcggcctcgtggctcctgtgtgaggtgtctggcttctcgccccccaacatcctcctgatgtggctggaggaccagcgtgaggtgaacacttctgggtttgcccccgcacgcccccctccacagcccaggagcaccacgttctgggcctggagtgtgctgcgtgtcccagccccgcccagccctcagccagccacctacacgtgtgtggtcagccacgaggactcccggactctgctcaacgccagccggagcctagaagtcagctgtgagtcacccccaggcccagggttgggacggggactctgaggggggccataaggagctggaatccatactaggcaggggtgggcactgggcaggggcggggctaggctgtcctgggcacacaggccccttctcggtgtccggcaggagcacagacttcccagtactcctgggccatggatgtcccagcgtccatccttgctgtccacaccacgtgctggcccaggctggctggcacagtgtaagaggtggatacaacccctcgccgtgccctgaggagtggcggtttcctcccaagacattccccacggctgggtgctgggcacaggccttccctggtgtgaccgtgaatgtggtcaccctgaacagctgccctctctggggacatctgactgtccaagaccacagtcagcacctctgggagccagaggggtctccagagacccccagatgtcaggcttgggctcagtgcccagcgaaaggtcagccccacacatgcccataatgggcgcccacccagagtgacagcccccagcctcctgccaggcccacccttttccgcccccttgaggcatggcacacagaccagtgcgcccactgcccgagcatggccccagtgggatgtggtggccacgaggggctgtacacacagcaggaggctgtccgccctgctcagggcctgctgcctatgccccagctgtccagccaagggaggcatggaagggcccctggtgtaagctggagccaggcacccaggcccccggccaccctgcagagccaaggaaaggaagacacccaagtcaacaaggggcagggctgagggctgtcccaggctcttttggcccgaggggctgccagcagccctgacccggcatgggccttccccagaagcgaccctgtgaggtggcctcacagagaaccccctctgaggacagtgtctgaccctgcctgcctcacacagatgggccccacagcagtgggcaacctggggggcagcagcccaacctgaccctgcagggactgccccctgcagcagcagctgcttctcagtcccccaacctccctgtccccgccagagggtcttccccgaagctgcagccccaacccatggctgcccacctggaaccgggactccctgtccactgccccctccccttcggggccccatctgtgctggggcccaggttcggcctacagattcccatcattgccatggcctcctgaccttgcctatccacccccaaccaccggctccatgctgaccctcccccaggctcccacgcccagctggccggccatccccaggcacagacagtctgggatctcacaggttagcctggaccatccacctggccagacctgggagaggctggaagctgccctgccaccatgctccagggccccaggttgcagtactatggggtgagggtgtgtgtgcacacccgtgtgtacctaggatatccgagtgtacccttgtgcccccaagcacaagtctccctcccaggcagtgaggcccagatggtgcagtggttagagctgaggcttatcccacagagaaccctggcgccttggtcaaggaagcccctatgcctttcttgcctcgatttcccctcttgtctgctgagccagcaggggccacgtcctgggctgctgtgaggaggaagtgagttggtgctaggaggggctcctgtgtgtgcatgggcgggaggggtgcaggtatctgagcaccccggtctccacttgagagagcagggcaggagctccctgacccacccagactacacacgctgtgtccacgtgtctcacattatctgtggcagaggatccggcttctttctcaatttccagttcttcacaaagcaatgcctttgtaaaatgcaataagaaatactagaaaaatgatatgaacagaaagacacgccgattttttgttattagatgtaacagaccatggccccatgaaatgatcccggaccagatccgtccacacccgccactcagcagctctggccgagctcacagtacaaccacaataaactcttgttgaatgaactctaggaagtctgtgacgtggctggttcttgtcaatgcttcctgcctgcccacaggctcttcctcgtggatggggctgtgcttgccatggaagcgtttttcccggcctaggcttgccttgggccccactgccgtctccagctggagatgaccttctatacacacatttgctcatgacagacccttgcttagcccccttccatggctccctcctgctgctgggataaaatcaccttgcctggatatcccctcctgggcccctttccaccctccttagtcagcacccccagttcagggcacctgctttccccgctgcggagaagccactctctccttgctgcccggctgtgtcttgccttccacaccttgtcacagtggccacttcctaaggaaggcctccctgtgtgcaggtgtgcagaagtgccccagcctcccgtcacctttgtcacgggagcccaatccatgagagtctatggttctgtctgtctgccccactcagggcagcgacaagtccaggcggggaggacacagtaggcagagatttgtcgaggggacatatgagcaagagggtgaggctgggagctccctggagataaccacgcctcctgggaagactcgccgtcatttcagctccacgctgtgcgggggtgggtggaggggtagcctggccctcatgaccagggagcttctcactcagcccccgttcctccccagacctggccatgacccccctgatccctcagagcaaggatgagaacagcgatgactacacgacctttgatgatgtgggcagcctgtggaccaccctgtccacgtttgtggccctcttcatcctcaccctcctctacagcggcattgtcactttcatcaaggtcaggggagcggccaggctctcagtgaccctcggggtgggtgtggggcaaggtgcccttccaggggacatgccagagttggtccagggatcctggaccaggcagaggcagggctgagggagcctggaggacatgcaggccctctgtggcctgtggacactgtcgaaggccctcttgaccctgtggataaaggacaacaccccctcccctgctcctctgtctcccctgcccctccacccctcaggcttctagccccctgtctgaccccaggggctgtctttcaggtgaagtagccccagaagagcaggacgccctgtacctgcagagaagggaagcagcctctgtacctcatctgtggctaccagagagcagaaaggacccaccctggactcttctgtgtgcaggaagatgcgccagcccctgcccccggctcccctctgtccgccacagaacccagtcttctagaccagggggacgggcacccatcactccgcaggcgaatcagagcccccctgccccggccctaacccctgtgcctccttcccatgcttccccgagagccagctacacccctgccccggccctaacccccatgcctccttcctgtgcttcccccagagccagctagtcccacctgcagcccgctggcctccccataaacacactttggttcatttcacctgcctcctgttctttgtcccagtggtctggattcacctcaagttaaaggacacagggagctaacggcaatgggaagggagtttggggtgtcagcagcaacagggaacgcaatagccaaagctgtcacagcaagaactgagcggagaccttgctctgaagttaatgggttaagaaacgcccctccccacaccaaacacaaacatttcacgctcactcgtacatgcacacacatgcacacaagcatctatgcacacatgcacatgtgcacagctcacgaataaacatatatgcacacacatgcagtacactcacatgcaaacaggcagatgcacaggcatgggcacacatgcacaaggcatgcatgtgcaggtctgcagacacacacatctgcatgcacatacacggacgtgcacctgcacacacacaagtgcacataggcatcaaagacacacatgctcgtgcacgcgcatacacacagacatgcacacttatgcatgcacacgccatgacaggatggcacgggaacaaccttgcacatggagcctgttctgtgtgtatcgagagcctgcacctcttactgtctgcatgactgtgggcaagagcctgaactccgtacctccatttcctcatcagaatggggtgaaaatacacctgtcaagtagagtgaggtgagaagtgagtaaaatcctatctgaaaggggctcagcaaggacccaggtattggtcggacctcctgttatcatctgctgtgggctgaacatttgtgtcctcctgaaattcatacattcgtatattcatacctttccccctgaaatcctaacctccaatgtaatggtattagaagatggggcttttgggggtgctgaggtcataaaaggggggccctcatgaagaggattagcacccttatgagaggggccccagagagctccctcaccctttctcccctgtgaggagatgccgtctatgagctgggatgcaggcctcaccagacacccatcggctggagccttggtctgggacattcagcctccagaatggtgggaaataagtttctgttgtttctcagccaccacgtctgtagtatgtggaagtcatcagaatcaaaattgagtcacctgtggttttttttttttctaaatccctgacaaatagagcctaggaaggccaagaagagaagagggttctcatccataaacacttgataacaaaaactatcaccaaggactctacaaaaactgcaactggcacaaagaccatcacaaccttacacagaaagtacttctgtgaggacatcttcccagcaacgggctgtccaacctcagactggcattgcctttgttattggtccttgtagagagggtaattatctcaaagcaatcatgtaatcctcctcatttttcctttgaaagccttggtctccctttgcctccctgaatacgcacatagctgatcatggcaggtgtatcccactgcagtgctctacctccaaatagatatctttttcttttagacggcatttctcttgttatttagattgagatacatggagtcagaagtgggatgtggagaaggatcactgctggaaggagtcagtaattcttgggccggtgtgcagtattcacttgagccctttgagctctcagctttttctgagctactccgtcttctctcaggccaaccctccctctttttggaagatgcttttttaatattatgtggggtttgtttattagactgccttaataaaggaccttatgtccctcctgggatgataaaaggcttttcgtgctttctggcaagtcctgtttagcataaagacattccagcctgagtactctggtttccacagagtttgcattctgtctctgagggatgtcttctctggtgaggtgcctcctttaatactttgttggatatgcatgcctgggtgaacatatttgtgagcacccttatcttgccttcttttgctgtggttatgtgtatctgtaaatgacctggctcttttcctctgcttgcttctaaaaatctttggagagcaaaataaacattctaaatggtgggcacaggctgtctcattagaagctgctacagcagtcaccaccgtctaaagcaccagtccaaactgccggcgtggcctcatagtatctgtagaatgttctttactgtaaaaagattaataagaaggggaatggtttttaaatattaaggcacagtaagttttctggaactcccgctggctacgtctttgtgcacatttttaaactaatgggcaaattacgtcaaggaaaatttagagttccaatggttatttttcgaactctaacaaaaaccctgcaacagtagtcatcatgcagtgcctcctaagtcctctatctctctattttgtttttctgcctactttaaatctgctgacttttttactcatgttgcaataaaactcactggttacagcattccagccaagatatttttggttttttgtttgtttgttttttgttttttgtttttttagatggagtctcactctgtcacccaggctggaatgcagtggcgctatcttgggtcgctgcaacctctgcctctcgggttcaagtgattctcctgcctcagcctcctgagtagctgattacaggtgcccgccaccatgcccagctaatttttgtattttagtagagacaggctttcactgtgttggccaagctcgtcttgaactcctgacctcaagtgatccacctgccttggcctcccaaagtgctaaaactataggcgtgtgccaccgtgcctggcccaagattttttaaagtttcctaaaggttttaaattagtggctttacaaattacaacagctctatggtaaccaatgacctagatgtaagagtcatttcttttgaaaatgtagattagctttgcttggctaacaactgcttaggctgatggaatagctaactgaaggactgatggtctcaaagaacagaactaggtaaatatttacagaaattgggctttcagatcgaacaggccaaaatcttgagcttagagcagtaatataaggtatctctgtctgccataaaaattttgctttgccacaggtgccagaaaaaggaaaaacactgctaaatgcttccctgcatgcattgtctagtccagaaaatcagaccagcaaccaaaaaatagatttgttactagtatagacgagttgaagattttgtttttcatatacaattcagccagtcctagctaaaacgcaatcactggaaatttaaccttaaattcatttaaaactgaaaaaggtcttttgaaatcaaactaatgcagaaactgctttacccaaaattctgatccatggccctcattagacgacccatcaggacaaataaagtttagcttgtgaacaagtcccagttttgtcaaaaatataatttggattgaagtgtcttttagaaactgacacatttgtgttattatctcatgaccaaaattctaaaatgaaagctacagtgtctttatttgtgtgcgtatgtggttaattgtgtttatgcatatgtatgtgtattatgttgtatgttgttatctacatggtaaaatctggcatcatcaacaaaaaatctattaagggattctatttagattggcttagataaataagcattcataaaaaatatgtactaattaacccaaatgccttttagttcatgtgacttaagtatatctttaataaacaaatcagttttaaaattgttggtaaaataaaaatacaaatgttctcagaattgtcagcatatatttttccctgagtttactcgtcagacagctttatatttgtctctgatagatgttttaagatgtcagggtttgacacaaagatgataaaactataaacccatcctaaaacagaataatctttgtatgatctttgataaataagactaatttggctgagtgcggtggttcatgcctgtaattccagcactttgggaggccaaggtgggcagatgactagaggtcaggactttgagaccagcctggccaacacagcaaaaccccatccctactaaaagtacaaaattagccaggtgtggtggtgggcataatcccagctacttgggagcctgaggcaggaaagtcactggaacccgggaggcagaggttgcaatgagccaagagagcgccactgcactccagcctaggcaacagcgagactccatctcaaaaaaaaaaaaaaaggctaatttaatattgcaggcttaataaaaacagctgtatcttatgagctatcgacaaaatacccatacacttcactaagtttcttactaagtgaacatctaataatcacaggctataaaaatggttaaaagggaaataactttaagtaatggctagctttgtctaatatctcaattttcataagtaatctaggtaaattattaaaaataaattaattaagcctggtgtcatggcacacgcctatagtcctagctactcaggaggctgaggtgggaggattgcttgagcccggaagttcagaccaccctgagcgatgcaacaagacccccatcactaaaataaataaataaataagataaatgtcaagaaaataaatgtttataaataagcttcttatgtaatttaagatcttaaaattatgttatcttcagttaaataatagatactcattaaatgtctgggtcatttccaaataagatttttaaaactaacacaaattactgaacataaatgtttgttcttggcttcttaaattttatagaaattttgtagaaagactaaatttatttgggtctattaatatatgtaaaaattatgtcatagaaatatgttttcaaaaattataaaatttttctcatctataaaatagtgatatgtgacaaatggttaaaatttgcttgctagaaaataaggttactaagagttaaaattctaattaatatatataattctgtctacaaagtataccacaaaaaataagatgtgtttttcatttttaaaaactataagacaggcatttataatttattttactgcaaaaaaaaatttatctaatttggagtttgtttaaaggttgtttcaaagcacagatttaggaaaaaagtaaaaacaagatggaaaagaaccactctcatctgcccccacgtaagacgtacctgctccccttccaccacgactgtgtttcccaaggcctctccagccatgtggaactgaatttaatctacaaatagagttgatcaagtaactttaaggtatatggacaataatatgctttgcagcataaagacctgaaaacaaactaaatgcccatcagtgggaaattgtttcaataaaccacagaacattccgtggaaaactccacagccattcaaaagaatgaagggggagagatcatcatggtggacaggagtcaggactagattgcagtccgactgggatggacagagcacatgtggaggctggcaccgtgaattttagctccagaacaactgcaggaataaatcaggaatcccaagaggatccacagaccatgtgaaggaagcagcctgctcctgcaggacccagagacaccccaaatactgtgagtgcccaaactgtggaagtgggaatgggagatcgtccatcctgcacacacaccctcactagagaaaccaaaggtctagttggtgggaaaaggttccaaccttacctggagctgagtcaatttagaaagctgagcgaaatacaggggtacagggagcagcgggaaaggccctgggagcttcctgggtccccaggcaggccattcctgcatggcaccatatgaatactttgggagggtggccagaggcacagggaaaatgtcacagggagaaggaagtctccagctgaacgcaggggagggcacgaatcctgcagaccccactggtagaggaacaaccaaagcccttcttcatagctgggaagtaggtagcctggggcaagttctctgcttgcccaatgcctggaaacagactcagtgctgttggcgaggggcatggtgtgagtgagacccaccttcagtttgcatgggagctgggtgacacctgtgactgccggctttccccacttccctgacaacctgcatgactcagcagaggcagtcataatcctcctaggttcacaactccattgacctaggaacctcacagccatcccccccagcagctgcagcaagaactgtccaaggagactctgtgagctcagacacacctagccctgcccgcatctgatggtccttccctacccacccttgtagttgaagacagagggcatatactcttgggagttctagggccctacccactgctggttcctctccatactaccaccactgatgctctctggaaaacgccatctcctggcaggaggccaaccagcacaaaaacagagcattaaaccaccaaagctaagaaccttcatggagtccatttcaccgccccgccacctccactgggacagttgctggtatgcacggcggagaaacccacagacagttcacatcacaggactctgtgcagacaacccccagtacaagcctggagcctggtagacttgctgggtggctagatccagaagagaaataacaatcaccacagctcggctctcaggaagccacatccacaggaaaagggggagagtgctacatcaagggaacaccccgtgggacaaaggaatctgagcaacagccttcagccccagaccttccctcagacagagcctactcaaatgagaaggaaccagaaaaccagctctggtaatatgacaaaacaaagctctttaacacccccaaaaaatcgcactagctcaccagcaatggatccaaaccaagaagaaatccctgatttacctgaaaaagaattcaggaggttggttattaagctaatcatggaggcaccagagaaaggcaaagcccgatgcaaggaaatccaaaaaaagatacaagaagtgaagggagaaatgttcaaggaaatagatagcataaagaaaaacaataaaaacttcaggaaacattggacacacttatagaaatgcaaaatgctctggaaagtctcagcaacagaactgaataagtagaagaaagaaattcagagctcgaagacaaggtctttgaattaacccaatccaacaaagacaaagaaaaaagaataagaaaatatgagcaaagcctccaagaagtctaggattatgttaaatgaacaaacctaagataattggtgtccctgaggacgaagagaaatctaaaagtttggaaaacatgtttgggggaacaattgagggaagcttccccagccttgccagagacatagacatctaaatacaagagcacaaagaacacctgggaaattcatcacaaaaagatctttaaaactaaaactaaaacaagcaatctacaaaacctaggcacattgtcatctggttatctaaagttaagatgaaggaaagaatcttaagagctgtgagacaaaagcaccacatgcttagtttcactggatacaaaattcttggctgataattgttctgttggaggaggatgaagatagggctccaatctcttctagcttgtagtgtttctgctgagaaatctgctgttaatctgataggttttcgtttataggttacctggtgctttcggttcaaaaatttttttaatttccatcttgatttcgtttttgacccaataatcattcaagagcagtttatttaatttccatgtatttgcatggttttgaaggttccttttggagttgatttccagttttattccactgtggtctgagagagtgcttgatataatttcaattttcttaaatttattgaggcttgctttgtggcctatcatacggtctgtcttggagaatgttccatacgccgttgaatagaatgtgaccatatgataggaaataaactccaaaagaagccgaacaacaacagtgacacaacctgttgaaacctctgggatacagcaaaggcggtgccaagaggaaagttcacacccctaggcgcctacgtcgaaaagactgaaaaagcacaaattgacattctaaggtcacccctcagggaaccagagaaacaagaacaaaccaaatccaaacccagcagaagaaaggaattaatcaagatcagagcaaaactaaaggaaattgagacaaaaaaatacaaaagataaatgaaacaaaaagctggttctctgaaaagataaataaaattgatagaccattagcaagattaaccaagaaaagaagaaagtcccaataacctcaataggaaacgaaatgggaaatattacaactgacaccacagaaatacaaaagatcattcaaggctactatgaacgcctttacacacattaactagaaaacctagaagagatggataaattctcaggaaaatacaaccctcctagcttaaatcaggaagaattatataccctgaagagaccaataacaagcagcgagattgaaatggtaattttaaaattaccaagaacaaaaaaaagtccaggaccagattcacagtagaattctaccagacattcaaagaagaattggtcctattggtactattccacaagacagagaaagcgggaagcctccctaattcattctatgaagccagcatcaccctaataccaaaaccgggaaaggacgtaaccaaaaaagaaaactacagaccgatatccctgatgaagatagatgccagaaatccttaacaaaatgctagctaaccaagtccaacaacatatcaaaaagataatccaccccaatcaagtgggtttcataccagagatgcagggatggtttaacatacgcaagtcagttaatgtgatacaccacataaacagaattaaaaacaaaaatcacatgatcatctcaatagatgcagaaacagcatttgacaaaatccagcatcgctttatgattaaaactctcagcaaatcagcataccaagggacatacctcagtgtagaaaaagccatccatgacaacataattctgaatggggaaaagttgaaagcattccctctgagaattgaaacaagacaaggatgcccactgtcaccactcctcttcaacacagtattggaagtcctagccagagcaatcagacaagggaaagaaataaagggcatccatatcgataaagagaaagtcaaactgtcactactgatgatatgattgtttacctggaaaaccctaaagactcctccagaaagctcctaggactgaaaaaaaaattcagcaaagtttccagatagaagattaatgtacacaaatcagtagctactctatacaccaacagtaattaagcagagaatcaaatcaagaactcaaccccttttacaatagctgcaaaaaataaaataaaatacttagaaatataccttaccaaggaagggaaagacctctacaaggaaaactacaaaacgctgctgaaagaaatcatagatgacacaaacaaatggaaacacataccacgctcatggatgggtagaatcaatattgtgaaaattaccacactgccaaaagcaatctacaaattcaatgcaatccccatcaaaataccatcatcattcttcacagaattagaaaaaacaattctaaaattcatatggaggccaggcacggtggctcatgcctgtaatcctagcactttgggaggccaaggcagtaggatcacttgaggtcaggagttcaagaccagcctggccaacatggtgaaaccccatctctactaaaaatacaaaaactagccgggtgtggtggcatgtgcctgtaattccagctactactcaggaggctgaggcaggagaatcacttgaacctggaaggtttgcagtgagcccagattgtgccattgtactccagcctgggcaaaagaatgagaatctgtcacaaaaaaaaattcatatgaaaccaaaaaagagcctacatagccaaggcaagactaagcaaaaagaacaaatctggaggcaacacacggcctgattccaaactctactataaggccatagtcaccaaaacagcatggtactggtataaaaataggcacatagaccaatgtaacagaatagagaacccagaaataaacccaagtacttacagccaactgatctttgacaaagcaaacaaaaacgtaaagtggggaaaggacaccctattcaacaaatggtgctgggataactggcaagccacgtgtaggagaatgaaactggatcttcatctctcatcttatacaaaaatcaactcaagatggatcaaagacttaaatctaagacctgaaactgtaaaaattctagaaactataaaaatttccaataacattggaaaaacccttccaggcattggcttaggcgaggacttcatgaccagaacccaaaagcaaatgcaataaaaacaaagataaatagctgggacataattaagctaaagagcttctgcacagcaaaaggaacagtcagcagagtaaacagacaacccacagagtgagagaaaatcttcacaatgtgtacatctgacaaaggactaatatccagaatctacaacaaactcaaacaaatcagcaagaaaaaaacagacaatcccatcaaaaagtggggtaaggacatgaatagacaattctcaaaagaagatatgcaaatggccaacaaatatatgaaaaaatgctcaacatcactaatgattagggaaatgcaaatcaaaaccacaatgcgataccaccttacccctgcaagaatggccataatcaaaaaatcaaaaaacattagatgttggtgtggatgcagtgatcaggggacacttctacactgctggtgggaatgtaaactagtacagccgctatggaaaacagtgcagagattccttaaaggactaaaagtagaactactatttgatcctgcgatcccactactgggtatctacccagaggaaaagacgtcattctacgaaaaagatacttgcacactcatgtttgtagcagtacaattttcaactgcaaacttgtggaaccaacccaaatgcccatcaatcaacaagtggataaaggaactgtagtatgtatatgtgatggaatactactcagccacaaaaaggaatgaattaatggcattcacagcgacctggatgaggctggaggctattattctaagtgaagtaactcaggaatggaaaaccaaacatcgtatgttctcactgacatgtgagagctaagatatgaggatgcaaaggcataagaatgacacaatagactttgggaacttgggggtaagggtgagagaggaaagagggataaaagactacaaatatggtgcagcatatgctgctcgggtgatgggtgcaccaaaatctcacaaatcaccactaaagaacttattcatgtaaccaaacaccacctgtattccaataacctatggaaaaataaacattaaaaaaattaagaagactgaaagaattaaaaaatttaaaaaacagtaagtagaagagaggtatgtgaagaaagttatgggtatgaagatgtatttttggtacggaaggttaaaaagaaaagagaatttttttaaaaaaggaagaatcttgcgtgataaatttttgtcataaagtaaaatgactgcttactttaaaaaaagaggtatcacacacaccagggcctgttgtggggtggggagaggggggagggataggattaggagatatacgtaatgtaaatgacgagttaatgggtgcagcacaccaacatggcacatgtatacatatgtaacaaacctgcacgttgtgcacatgtaccctagaacttagagtataataaatatatatatatataaagaaaattccacacctgaagccatgtgacaggctacagacaaaacacagttaaaactttgtttcatgtacaaagttatttaaaatattgtacaaaatcaccttcaggctgtctgtataaggtgtacatgaaatacaaatgaattttgtgtttagacttgggtctatccaagatatctcattatatatatgcaaatatcccaaaatccaaaaaatataaaatctgaaacacttctggtcccaagcatttcagacaggggatcgttagcctgtaatgagagggagtatgggtcaattatgacgttgaagattcaaaaaaaatttttttttaattttcagtcaagctctaccaactacactaactagaaaacactcaggcagattgctttttgctaggttaatatggcatgattacaactgtgcatatgaataacatgtatcagattccttttgtttgggaattatttcattacaacactaaacactgcttatgtacgctgggtctctttttcaaagactacaaataatgcttggttctttgctttcaaaatataccaaacatgaggtacaagaatgtacccatccatatttgaccaggggtagaattaaaaggtttgggttgaagaagatgacataacatcccaagagggttgcatccctaggggtcatgggaacaaatgtggccaagtccctttttaactggaaaggatttcagatccctgaacaagacaattcatcagtcttaagcatagtaagtcatcagcaaataagagaatgataaacactagaaaaataatcaaatcattgtctaaattcattataaaactatatgagaaaactataaaactatatgagagagataaacagagacaagaagacaaggataaaataaaaaaagaggtatcaaacaaagcagaacgcctcaacatgtcataaaacatctgagtaagtcataataaggtttgcaaataatgaatttacgaaaggaattttgcgtgtgatcaagatggctataattagaagggaattatttataagtctttctaaagactgaggtttgctattaaaaatatgctaatataaaactaaagatttagtttcctgtgttagaacaacaaagttatcttgaagtattgatctgttcttaaaactacaagaagtttttatttttaattctaaaatctgtttctttaacagaccatttctattgcttcctgggatccatttactttccctagtttcaggttggaagtcctcttcatgtaaaacgagaatttcatttcttgacatagtcttttccccctaaagcttctcagttttagatttcagaacttcaacttctgttgtatttcacagcacatgatttatagatcatgtatataaatatggatttatagatcatgtatataaatacagacttatccatcagtgccttcagctcttcctccccatgagatggcctggggtgatagctctctctttcaactttttttttatcaactcctataacattttttctcccattataactctgttgttatggctcaatgctgaaatgtttatcctgaaagtctagaaaacaaatgttctctccagtataattccagtataattgaattttcccttgtaaccaggaagtttctcatgctgttgctttttctatgtgttcccctgctcaggtactagttatcttgtttacatttctctactaatggtttacacttatagccttggacatactctttctctgcctaattaaactcagtgtctttttcatcagatttgacttccagtttatctacatgggcttcccatgaggagacacaatcacactgcaggaggcatttctttaacttttgggtaagtagcctaaaaaaaacaaagattttgtattttattaggataattttttgtgttgtctttatgaggtttttggttacttaggtaacttgagctttgaagaagttaggtccttttaatccatgtaactttccgtattactcttcaagtcttttgatgatcactggttgaatacatggctatatttaatagtgacctgagattctgctttgattagccatgttgaacctttgacatctttggcaggcttcctcaggatcaaaattctaaaataagtctttttttatctagaattgacttagggattttacagttagacccctggaaagcctcaaagaatttatctctcatcctatagagaaaataaatgattaggcttatttggtaaattatatgggaaacattgtcaaataataagtgatattagatcttctttcagttacatttgtgggtatgctattgatatgatgtttcaaagattatataaattcatatcagtctataacgttatcagccataattttggttatgctacatcttctttaaagctatatttgtatggagacgttactgatgtgagtatattctaaagattatgtgaaatttataaaaccctgatggttctgatgtgatgctatcagtcacagtcatgattctgtttgctaccttaaaacactatagtaatttttaaaaagtcaatttccttatcaattgctgattataatgaatttttatcagatgtttaaccatggccattttgtttttgtgacccagagttattgttttgatttttctccaaaagcatttgtaatcagctattgtccaaaattgcttttcatggaagagactcaaacaggaactcttaaatacggtttcccgataaaagatcaatggactcaataaaaaattttcagaactctaataaagaaactgagaaattcaaaaacctccaatcaagctcaagcagaaaagctgacttcatgatattgaagaagtgatgaggggaatatttttatgaattttatttgaagcatcgttcgttcttaaatgttttgtttgccagatttaaggaaattttctctcgtaagtcatctatagtttacagtaatttaatacagtatactttttgtgaacaaagatgaaagcaattattttcccccctacgtgactcctccaaaatttagaaactattcacaagtgttcttatgacgatgtggccatttgtataagtccagataaaaactagttgtctcctcactgcaggatgtaattggaaacatcaggtatattactaaggctttggctgaaataccatatttgaaaaatatacatagaatgcctagtttcagccgggcggggtggctcacccctgtaatcgcagcactttggaaggccaagccaagcagatcacccgaggtcaggagttcgagaccagcctggccaacatggcaaaaccccatctcaatcccgtctctactaaaaatacaaaaattagccaggtgtggtggcgggcacctataatcccagctgctcgggagactcaggcaggagactcttttgaacatggaaggcagaggttgcagtgtgccaagatcacgccactgcactccagcctcggcaacaaagtgagactccgtctcaaaaaaagaaaaaagaatgcctggtttccagggttccttataatgagtaaaaatcatcatttcctggcaagcccagaaaccttaaaactgtaagtaaaagctaaagcctgtcttggtttggcttaccagcataaagaggtattgaagtacgagattcctatgtgatcaatgtacagaggaaaacttatgcttccaaagaaaagctgtaacacacctgcttttagattgtagctctgtgcattattttcaagttcttgttttctacctatagactagatcctgaattcttctagattcttccaatccaactttcttccatggagaaaaatgagaactgctctgttcctgaagccctataagctgaagctagataaatgctaagaaacaagtctcatgcttgatgtccgagccagacagaaagttcaccagactgcccaatgccacgactagagacattcaaactgcaaagcaagatgaggaatttcacattttcactctgtagacagcttctcccaagtcatgggaacaagactccatatcataatgggactcttacctgtcctagggcctacagtttttacttggcttcctattttatttattcaattaattgccttgaatcctggattcattatttattcaattaattgcctttaatcctagacattgcataatcctattatgcaaactaggattgtcatgttattactaattttactttttattttccctttttaaactttgtatctgttacttgctgaattttttcagaagtacaacttctaacagaatattgctagcccagcactttgagataatagcaaaagaccacaccacagacaaaattgaacttaatcatttactccaggtagacttagcctgaaagccactgtcttcaaacctcctttgttactcaaatgtggctaaaaggattttgacactgactcctagacatcaatcactccttcaaacatgtgaccagaccagacacctgggacaggcccatccaaatactgagggacatcagaacctaccacagcatggtccatcagtgaggcttccagagaaagaccttgaccaaagggagaaaatatgatgaaagtcgtcagaatcaaaatggagtcccttgtgttaaaaaacaaacaaacaaacgaaactctgacatataaagccagagaaggctgagaagcattctcatgcataaacacctactagcaaaaactatcacaaaagactataaaaaacacagcctcgcacaaaggccattgcaaccttacacaaaaaaatacttctgcgaggacagctgcccagcaactgcctgtgcgcctcatactggcatcacccttgttattgatccttgtagccaaagattatttcaaaacgatcatgtaatcgtcctcatttttcctttaaaaacctttgtcgtcttttacctccctgaatatgcacatagtttatgatggtatgtgtgctcccactgcagtgcttggggaccaagctccctccacacctcactgttcccaaataaatattttctgttagagcctctctctgttcattatttagctcgacaggtatttggtacagcagccaaaacaggccaagacattgcccggaatcttccagcagtagactgggggcccggatttgaccctggtcagttggacacgggcttctctcactccaccagatgaggaacaaatagtgaggtgtggcgggagcttggtccccaaacagctcctccggccatttgccctccccacccacggaccagagacaggacgagggtgagccccggtgtcagccatgtgccccaaccccggtgcctcatttgctcctaggatgcgtcctgtaggtcatcttcttgcagctgtcccgctcagtctcccctcaacccctgctcatgctcttggtgagcttatcaatattatggtttccaatagcttctgttcatagtttcaactcatatctgtccctaagtgtggacttttattccacgcgttggcactggcagtcagctatgtgcctcctactcaaggcatctgaaactgcaggtgggtagtcggctaagtcaggccccaaaagtgtcttcatccagattcccagaactgtgactctgagatcttacatggcaaaagggactttgcagatgagattaagccaatgatcttgagatgaggagaggggcctggattacttgggtggctccgaatgtgggcacaggtgtcacaggagggaggcagagggagacgtgagaaggagaaggtgccatgactccgaagccagaggctcctgctgatcctccggccccacccccaccccacggaccatgtggtctttttaaaacatgaatctatcaggacggcccattcaaacccacagagaggttcccactgcaccaagaacaaagtcagaactctcaggcctgacccactgccctcggccaccctggagccccagtgcccccagacccggtcctggcctcagagtgtaacaggctcactcccaccacccatctgcatggcaggcgccttgccatcgcctcccctctgagagcacagacagccacagctggcctccgggtgaaaggatggatgaacagtcaggccgggcgagtgctctcagagcctgctggccaacggaggcagccgctcaggcctctgcctgagccatgtgcgatcacagctgccgcccagctgtcccaaggaggcagctcttggcttttcccctgggagtcgaattcgcagggagtcccatccacaggcccctgggaggcgggaagacatctcggtctccaaagccagtaacctgtgattcccctgaggatggtgggaacctggtgtggggcagatgatctgtatttgagctttgtttctctctagcaattatacctaggaaataccctaaaatgcacgacgcaatgcacattgaccccagcaaactccccaccctgcgcctgtttctagtgccggggctgctccagcacagcctgtgcacttgaccgaatgtctacagccctggccctcagccacactgtgttgttttcatgcaccttcacccaacagaattgctccaacagagtgattcagggggctgccctccagcaccacttcccctttccatgttacgtaaatgtccgttgagtcctgactgactacagaaatctgtcttctgggggcatgtgatgccccaggtggcccagggccccgcacaggaatgtgtttacagctttcccggcactgaagccacagtcgtaactcagcctcctgacatgggccagggccctcgcctccgcacgctctgcagctcacccgtgtcgccacagcctgctgggcctggacgccaccctctaaggtggcactcggggcagaaacatctgtttccagctggtaacaaacaggacatgtctgcctcccacacctaaatcaatgcttgacaagcctggcctgatctcggggcgctcaccaccagccacctgcctgggcccagccgacctcctctcccttggtattttgagggaagggtctgagccctttctgcccccctagacttgtggacagaggccccccaagacctggacagaaatcaggccatagtctccagccccaaagagacttccagaggcctgcacctctcctctccagccgaggccctgatgtctgcggctgtggccatagccggctctatacctgccaagtttattctagaaaacattggtttggacaagacctcaaaacggaattgggaaaatgaaagagaaaagagaaaggatttctgctctcattgtaaggacaaaaagcaaattgaagaccagcactgatacagatcaataatcacaccagaaaaaaatatggcaaaatatctatattctcttaaggtgaataagtgttctctcagaatgaggctaaggccaggaacagtgaaaagtaagactgataaatttgcccacaaggaaaaaaataaagtctctataaggacaaagccaccaaaaacaaagtaagcaccccaggaaagaaagtgaccaaagtatctaacatgaaagagagcctgtattcgcatgagctcccgagaaacagaacccatagatgtggatgtggatatcgacagaaataggtatcaacatagacacaggctatggccacaggtatggatagagggagagatgcgagagagagattttaaggaattggctcacacagttgtggagacgaatgtccaaaatctgcagggcaaaccagcaggctggtgacccagagaagagctgaggctgctgctcccgtccaaagttcagcctgctggcagaattctgtcctccttggggactgccgtctgttttctcttaaggcctccaactgcctggatgaggcccacccacattatggatgatgatctgccttactcaaagtccacaggttgaaatgttaataacatctaaaaatcacctgcactatctagactggtgtttggccaaatatctgggtagtatggcctgcccaagttaacacctaaaattaactatcagagtccaagtaagtgaatgtaaaaaacaaacaaacaaacaaacaaaaacatgatgaatgagacaagctcgaccttgaagaagttttcagtggaacgtggggaagaggagttctctttagccagctgcagacacaaatagccaatagaacacatggagagtgttagaagtcacaaatcgtcaatggaaagcaacttacaatgtgatgttcattgaacatctactgtgtgccaggccaagggctaaggtggacacgtgcagtgtgtctgcactgcggcactaaggtcctggtggggaatggataatacaattaaaaacaaatcacaaagaaaccagaagaggaaaaaaagcaattaaaaacaaataaatgctccataaaggacaacagcgccagctgagggtgtggccatcaatgccaggcatccagaatatgtccttggggacatggaccactgggaggtgcatcccaggcaaaaggagcaggaggggaagggtccaggccagaaacatgcttgccaagttcaagagcggtgggaaggccagtgggcttgggaaggagtgggctggaaggacaggccagaggccagactgcatggggccagactggccctgattccagccttggacttcactctgtggtgataggagaccctcagagggacttggggaggggttgtgtgttttcctgggagccacagaaaagtgagtgacactgggctgaggaaggaagtcacaggacccaccagtgtctgcgcaggagtcccagtggaagagcagaaaaaatccaggagaagatacaaaagtattcaaaagtaattcaaaatagcaaaaatccaaaatattcaataatttaaatggtattacttaaaatagtattataaataataaaaatatattattaaaaataatagattactggctttaataccaatgtacagaaatccgttttatttctatagaccagcaacaaacggaaaatgtgattcttataaagatgccagatgtctgcttctattaagggcatacagggaactcggaccagttagcaaatctgaaagaagtattttaaaaatctgtttgaaggtaatggagagataccagagtggtgaataatagccaccaaagtagctgccatttgcagtcacttccccctgagcccctccccaaaagcatttgctgattctgggatagtcagtgagaagctgagcagaaatcctgacaatcttagagctagggagaaaaactcagaggccaggactcaccaggagaaaggcgcttgggaagtacatgcactttggattagaaacccatggactttccttataggagcaaaggtgaaggaaatcatccctcacaggaactgcaaccagatgcactttattcaggtccttagaaaagctcaacctctaccactgggttaagttgatctcagattttgaattccaccaggaaccagccagaagcatatgaaaaccgtctctggaaaattataacgtcattttaggttcagttgctcaacccaatacttctgaatacagtatccagcacacaatcacaaagaaccacacatacaagtagacgaagcaacatgagtaagaacagcaaaaacggaagatcaacagggactccagacctcagctatgggaattagcacatgaagactttcttaatactttttatttcaatagcttttgggatacaagtagtttttggttacacggatgaattctatagtggttaattctgagattttagggcacccatcatccaagtagtgtacactgtacccaatatgtagttttttatccctcacctcccccacccacttgtaatcccagtgctttgagatgccaggaggtttgggaccagcctgggcaacatggcaagaccctatctctacaaaaaatgtttaataattacctgggcatagtggtacttgtctgtagcccccactatctgagaggttaggtgggataatcacttgagccagaagtttggggctacagggagctgtgattgaatcactgcactccagcttgggtgacagagtgaggccccatctctgaaaaaaaataaaaataagtaaaattttaaaactgataaaataacagtgctactaggtttgaagagtttaaacacaatctgaaaatttcatcataaattgaaaactataaaacacacatagcagatcttttttaattcagaattttagaacagaagtatacaatgaagagctcaaatgatgggtttaagagcagacttaacacagctgaagaaagaattagtgaatcagaagttggatcagaagaaaatatctagaatgaaggatagacaaaaacacagcatggaactggagggttaaaagaagagagtatccaccgataaggtctaacatataggtagttagagtcccagaaggagaagtgagaaggaagagaagaaacatttttaaagaggcaattgcagaaatcttcccaaacttaaggaaatatcctaccccatcattcatatggaataaaatacgtagaaaatctcatctatgccaggcgtggtggctcatgcctgcaatctcagcaactttgggaggctgaggcaggcagatcacttgaggccaggagcttcagaccaacctggccaacatggtgaaaccctgtctctagtaaaaatacaaaaattagctgggtgtggtagtactcatctgtaattccagctgcttgggaagctgaggcaggagaatctcttgaacccgggaggtggaggttgcagtgagccaagattgcaccactgcactccagcctgggtgacagagcaagactctgaagaaaataaaataaaataaaaccacatctatccataacattataaaactcctgaagactaaaaaaaaaaagaggctatcttaagagtagccaaggtcggggaagctcacaatacctttaaaggaggaccagtgaggctggcagctaatgtcgtaacagaaacaagaacagaatgagatgctgtcttaggctggcagctaatgtcgtaacagaaacaagaacagaatgagatgctgtctttacagtgctaaaagaaatacctgctaagccagggaaactatctttggaaaataaagatgacttttctttttctcttcttttcaattttcattccctagggctatcctaacaaggaccgtaaagaacagaagtgtattcttgcacagctctggaagctggaagtctaaactcaaggtgtcaggagggctgggctctctctaaagcctctagggtaggatgcttcttgccccttctagcttctttttttttttttatttctaaaacgactttattgctaagaaccatgattattacttaaaatagatttttcagttactgatataaaatatgttccttttgagaacaaatggacacatagaggggaatgacacacactggggcctattggagggtggaggccgggaggagggagagggtcaggaaaaataactaaggggcactaggcttaatacctgggtgatgaaatcatctgtacgacagatccccatggcacacgtttacctgcgtaacaaacctgcacgtgtacccctgaactcaaaataaaaggttttttaaaaaatgttctttgtgcttctaaaaatgtctaaataatcctatatgcatttttcttatttgcctcttatgcgtagcttacagatttaaaagtacaatgttgcttgttttgtattcatcttggtggatctaataatttacaaataggacataggcatgctgatacagtcagcagttaattcctccttctgacagtggggtttggacatacaaccagcaatgcgtgcaggtggagagacatagaggatctttttttttttttttttttgagatggaattttgctcttgttgcctaggctggagtgcaatggttcgatctcggttcactgcaacctccgtctcctgggttcaagcaattctcctgcctcagcctcctgagtagctgggattacaggcatgcgccaccacgcccagctaattttgtatttttagtagagatggggtttcaccatgatggtcaggctggtctccaactcccaatctcaggtgatccacccgcctcggcctcccaaagtgctgggattacaggcgtgagccaccacgccctgtacgaagttttaggtcatctgtgattcacaaacgaccggcttcgagaagctctggaacgtgccaaacaaggcactgtggagtagtttggctccatgtgacctaagagaggaaaatctgttgtctttgggaacattacacaattcaggtaagatatgtgcatattctcaagggaaatttaaggtgctcatactcaataaataaacacaagagcagcgttacagataatattcaaagagacagaggcttcttcatacctgatgtggtgggaagaccactggatgactggacactgagatacgtggttgacagtctcgtctctgaaacacatgatttgagttttgagcttagacaaacttgtttttctccagcatcagttttttcatcagtaaacaataataataatactgtgtttatgccaacatcattaggaagatcactttaaatggtgtatataaaaggatccatcaactttaaagccagtacccaatatacactcatagatatcagcgtattacagaaaaatagtatttattttgtggtcaagcatatctggattctaatcccaattctactaattgctcccttatcttttgtgtcccgtgatcatcaatgtttttatcattagaatcttgataatatctagctcaccatgtttttctggaaattatatgagataacatatgcaaaggacttagtgcagcaccagatgtgactcttccagctcctgtggttgccgactgccctgggtgttcccgggcctgcagacgcatcgctccagcctctgcctctgtcttcatgcagtgttctccctgtatctgtgtctaaatgtttctcttcttataatggcactggccatagtggatctaggacccactctactgtagagtggcctcatgttatcgtgattatatctgccaagtccctctttccaaataaggccacattctcaagttcttggtggacataaatttgggggtgactctattcaacccagtatactttctcttcctgagaagagcagtttggactcaaagctgttcggtgggcagatcaagggttggggggtgtctgcatggtgggggtaggaggagagatgcaggggcccagagcgggaagccagtgtggagtccaggctcggagcacccacatgagcagaggtgggcagcctgatatagaaagtcagatcttaagtggggtgagaagggttccagatggggaggagtgcacactagaatggagggggagccagaatggcagaggggaagggagtactggcagagagggcaggttggtcacacaaggggattggtcaagtaagtaaatacaccgaaaagaatagaaaagagagaaggcagttccaaataccaaaagggagtgatatggtttggatctgtgtccccacccaaatctcatgtcgaattgggtttcaatctgtgtccccacccaaatctcatgtcgaattgggtttggatctgtgtccccacccaaatctcatgtcgaattgtaatccccggtgttggaggtggggcctggtgggaggtggttggatcacgggggtgggttctcatgaatggtttagcaccatccccctagtgctgttttccttatagagtcctcccgagatctggctgtttaaaagcacgtggcacctccctggtctccttttctcctgctctgggaatgtaagacatgcctgcttcccttcaccttcaccttccaccatgattttaagttcctgaggcctccccagaagccaagcagaagccactatgcttcccggacagcctgcagaaccgtgagtcaattaaacctcttttccttataaattacccagcctcaggtatttctttatagcagttcaagaacagactacagggagaaactggaatgaatcctatggtactggattggaatttgatccgtaagtttgaattcatggtttctaacataaatagccattatataggagttgtcctgatttgtagaaaacacactaaaatattcatgaaggaggaggtgtcaggtcaaaaaaatactctcttgaatgattcagataaaaattgtttgtacttttcttgcaacttccaatttttggctgaagctaaagaaatattttcagacaaaacagaatatttgttgccagaagacacacattaaaggaactgcttaaagataggtttaagaaagaaggaaaatgatcccagaggaagcctcagagatgaaaaaaagaatttaagagtgtaaagtacacaggtgagtacattttaagagttattaactaataacaatgatgatgtgatggatagtgaggatagaaaattaaaacaattcagatgcatagcaataacatataagtaatgaagggctaataacactgcatcatcatatctgaaaagaagatcaaagaattagtgacaaatttcttgataaatttaactaatagaaaaaaatgcaactgtaagaaagtccatccaaagggaagcaaggaaaaagggataaaagaagaccaacaaggacagcattatctcacttatttgtggaatcttaaaagagttgagctcataaaagtagatattagaatggtggttaccagaggctagaggcagagagggagagaatggagcgtggttggtcaaagggtacaaagtctcaggtagacaggaggaataagttctgagatctattgcatgacagagtgactatattcagtaataatgtatattttgagataactaagagagtaaattgaaagggtctctccacaaaaaaataagtaaatgaggtaacagatatattaattagcttgattcaatcattccacgttgtttacatgtatgaaaatattgtggctgggcacagtggctcacacctgtaatcccagcactttgggaggccaaggcgggtggatcacttgatgtcaggaatttgagaccagcctggccaacatggtgaaacctagtctccactaaaaatacaaaaatcagctgggcgtggtggcacatgcctgtaatcctagctacttgggaggctgaggcatgagaatcacttgaacccaggagacagaggttgtagtgagctgagatcatgccactgcactccagcttgggtgacagagccagactctgtctcgaagaaacaaacaaacaaacaaaaaacattgcattgaactccataaatgtatctaattatgatttgtcaattagaaattatattaattttaaaaccacattgctagataggagatttaggctcaaatatatcagtatttacattaaatgtaaatgggctgggagtaatgtcactgaaaatggcagctccaaaaatgtgtcccttcacgaaagcaacaattaagctggcaaaaaactgacagaattcattttttcataactctagaatataaccaaaaacttaaaacaaagggtgcttaatgaagaaagaaactgctaaatttgggtaagagagaattgtggaattttcttacctgcctataaagccctcattttccagctcagaagtagccagggcaacagcagcccatcttcccggtgtggtttgctggtgccagagggagtaaaaaagccgttgtcatcaaagaattgtgcttgcgaatctcaacctatctgacagctctctgagggatcagctcaggatcttgcctttgttttgctcaccctgctcctgcccttcctcccctgtgtcctacccccaacaaacacacacagaattctctacaggatggaacagcctcctgggcagcatacatggaaagtatttaaaggtatatacttgtcacaaccatctaggtcaacagataatagaaagggaaaacagtagacaggctaaaacgcctaggaagaaaaaggctaaggaaggaaacgtggggaaattagaactttaaaaaactcccacatatactaaggaattcaaacagccacatgtatttctagatgtatgctcagataagacctgagaagaccctaagcttttacctctggctggtcattaggcttcacatgagcaggaagtaaaggctaaggcagagttgtaaatgacctggttaagtgttgcagcagtgctctaacccagagccagcctgcaaagaacaggagggtcttcttcctctttctttctttctttcttcttttggcttaagaaatttaagaagatctgtgaaaacactagctgaccactaaactaacataacaaagatttcagtggccacatatgacaaaagtcttcacaaaagtagtttagacaagtcactaaacaactataacacaaaacaagcagcaataacaaaccctagggagaagaaagaatctagtttcccatattataatatttattcaaattttccagtttttaacaaagaagtatgagacatgcagaaaaacaagaaatatgaccctttcacaggaaaaggtaaattaacggaaacttcccctgaggaagcccaggctgtgaacttactagaaaaaggccttaaatcaactgtcttaaatattctcaaagagctaaaggaaaccaggagaacaatgcctcagaactagtgattatcagtaaagagatagaaattataaaatagcgccaaatagaattcttgaaatgcaaagtactgtaactaaagtgaaaaactcactacaggttcaagaggaaacttgagcaggtagaagaatcagtgaacttgaaggtaggccaattaaaattctcccaactaaagagcagaaaaaagataaggaaaatgagcttaatttgaacaatatgatcaataaatttgatctactaggcatatacagaccttagaaagagcagctacagaatgcaccttcattttgagccaggtggaatattcacacattataccatttatgaccacaaaggaagatttaacacattttgaaaggctaaaagtatttagttatgatgtgatcacagtgctaagtcagaaataaataacaaagaggtaagttaaaatacacatatgcttggaaaataagataaaaactgctaaataaccctgaagctaaagaagaaatcataatggaaacattaaaattttaaaaagtttaaaatatttttaactgaataataagggaaatactacatatcaaaacatggtgagatgcagcctaaacagtgcttagaggaaaacttatagccttagaagcatgtattatgaaagataaaatcctgaaagttgatgaactaaaaattcacctgaagaagttaaaaaagaatgtaaaaccaactgaaaatagaaggaaagagatcattaaaataatataagaaaatgattgaactgaggataataaagcaaagaaatgatcaaccaagtgaattaacaaaattgataaatctctgataacacttgttggggaagaaaagagaaaatgcaaataactaatgtcagaaataaaaagggacgacacacacatcctgcggatgtttaaaatgtaaaaaagaatatttgggaaagctttaagctactaagtgtgaacaattggatgaaatctaactggataaatgtaagtattaaaaaagtttaatctacaatttataaccttaccccagagaaaactgtgaaccagacatgatttcataggggatttctgatcaatatttagggaaatatcaacactcttagacaaactcttccagggatctgaagaagagtccatgccctgtaagctactgtatgaagccagtgtaatctgagttccgttgggactgcaaccgataaagtaattcatcacagaaatgacctcaggaaactggccttcagaacgggcttctgggaagttgtctcacatatttgaggaccacaggcataattcattgcccgcaggaaatggggcagccatacatgacatgtggtggcaccatgatgtctcagactgtcactgacaggagtgcatccaaagtacaaggagagaaaaaggcatgggcaggtcaagatgcagtagcactttgttgtcatggcaacaagagggctgctaaagattatggagtcaccaactttttctcatgaccatagagagtgtacacaggggaaaagaaacagtgaaagctatgaacatagcaaaaagaacatatacagagagccatggacgcttgaaggagtcccttacctcctggtcatgggtcagatagagctgatacccaaccaattcactacagatgaaagtcttagaaattgtggggctacaacatgcaaagttttatcatcatcccacataacactaaacaggaggctctaactgcattcttgttggacatgtatccaatttcagaatagtgttccaagaatctgcctcctaggaccacttttgttggtgtcagggatccccagaagctgatcttgagagaatattttaagtggacagtttgtttgagaggtgatgccaggaaacactggtggaagagttggggatgaaaggaagccaataaaaagtgcactaataagcatgttaccatggaaataactgtaactgaaattcaccagggccctcaggaagccagtgtcaaacaaacaccttctcagtacgtccccccaacacacaccagcagcaagggagtttggggtatttatatgctaacttattagtcattggttgatggcagtttgtgcagagcaaaatcctgtgcaacttcaggcctgttgtgcacagaaaccctgactaccagagaaaaccctcaggcaagaagatgcagatgctagcagtttgaggttacaccagtatacactaaagtgtaaaggcccaaggcacctggagtgcaccaaaaactattgccacaggtgtacaaatgttcaaattaacaagaaaatgccatgtcatcctccaaagtcatggcaccaattcacattcccatcagcaaatctgagaccttatccaataccaatatcctgacctgaaactagatcatcatttatttgcatctgtgtttccttcttttatgtatccttttgtctcttgatcagagttagccacactctttattttgtatgcatcattccctccctttccataaaaaaaatttatcaaatatggccgggcgcagtggctcccatctgtaatcccagcacgttgggaggccgaggcaggcagatcaccagaggtcaggagttcaagaccagcctggccaacatggagaaaccccgtctctactaaaaatacaaaaattagctgggtgtcatggcacacacctgtagtcccagctactcaggaggctgatgcaggacaatctcttgaaccttggatgtggaggttgcagtaagccaagatggcaccactgcactccagcctggatgacagaggcagactgtctcaaaaaaaaaaaattatcaaatatgtatgtatatctgaacttgtctgattctgtttgcccttgagctatgtaaaattatatcatactatatgcagttgtctgcattggcattttttaccaatttttttacatcttgtttccaagattcatctatgttgttgtggggagttgtaatttattcacttttactgctgtataggtttccagaatttattttccttggataattgtttcaaaatttttctattattagctgccttactattgcattcttgttcctgtctgttgagatcctgttataggctgaatatgtcctcacctctccccaaattcatatatggaagccctaatcctcaatgtgatggatttggagatggggcctttgggaagtgattagtttttgatgaagtcaggagggtgggcccccacggtggtggtggtcatgagggtggtcctcataggaagaggaagaaacggaagagcctcactctctctgccatgtgaatgcaccatgagaaggtggccatcttcaagccaggaagacagccctcatcagaacccagccacgctggcacccagattctggacttccaacctccagaacaaagaaaactaaatttttgttgtttaagccacccagtctatggtatttttgtcaggacagcccacactaagatggatactagtgggagagtttctctatgaaatatgcacaggagtggaagtactgaggtatagaatattatccctatttagttttctggaaagtgttttatcaagcatgttaccatgacaattaactagagtctaacacctctggggaattttgattatcgttgtagaatatatgccttagaattatcaccagggacaagtgacctcaggcatttacacacacaagctcccatcagccatgggttaagagctgctccaatgagtactaattcctggcacttctgttctgtattcatttaggctctggaagccacaggaagcaatcagacaaaaagtttcaggtgtcgtggctgggcatagtggcttatgcttgtaataccagcactttgggaggctgaagcaggaggatcacttcagcccaggagttcagaaccagcctgggcaatatagtgagaccacatttctacaaaaaatttaaaaattagctgagtgtggtgatgcatgcctatagtccctgttactcagtaggctaaggcagaaggatcgcctgagcccaggaagttgaggttgcagtgagccgtggtctcaccactgtgtgcattccagcctaggtgacagagcaagactctctctctctctctctctctctctctctctctctctctctctctctctctctatatatatatatatatatatatatatatatatatatatatatatatatggctgggtgcagtggctcatgcctaataatcccagcactttgggaggccaaggcgggcagatccctgaggtcaggagttcaagaccagcctggccaacgtggtgaaaccccacctctactaaaaatacaaaaattagccaagcatggtggtgcatgcctgtagtcccagctatttgggaggctggagtaggggaatcattgaacccagaaggcggaggttgcagtgagccaaggtcatgccaccacactccagcttgggcaacagagcgagactctgtaaaaaaaaaaaaaaaaaagaaaagaaaagaaaagaaaaaagaaaaaaaaaggaacacagaaggcacaaacagcatccactacagtcacccctcgcatgtctaaggtgcacttgcaccccacagtgatgtcaccacttcctattatttcctctgaaaatgaacccattttgagatgggcttgggccagaattacccttacccactgatccctgtaaacactcactctaacaggtgaggagtgaagagaatagggaggcttctatggtattctggtccctcaattcattatctgggttcatggaacaactacagattctgctgttgcaactgatcccgaggccttcattggcctttgtcatctcccttttggagataggtttctaagggtttcccttgaccatggcaagaacttctgctgggctatgctctatgcctggtgggatgatccaaacctccattttctgcagaattacagaccccaacaaaaatgtccttattccaggtcttgaggtcccactccttcattattggggtgctttccttagtggaagagaactttgagctcctggattcagccttctttgtaatcccactactcttacaatcaggttctgggcccaattttcagtagtttcttctccagctgcaggagatggagttttttctaatgctgtgatgaaggttttctgaaatttgcaccatttcctgagttgaaaggggttcaactgagcctgttgttatatttcttcagtgattcaatttcactaaacaacaaccaaactattccaccattcttatgatcctgtctttctcaaaggccagagaaattacataaggagcacatcccccaacactgtaacactttctatctatgtcccattatcataatgccaggagaagttatttacaaagggttatttacaaaagtgcaagtgagatgtaagagaaccactagggatagtgcagtaagccaggttaggtaacaggagggctgttgctgcccacaaaaccaaatctcaaggtgttttagacaagacacaaactgtaaaagacttattggtaaatttaactatacaaaaattaaaaagtcatgtccatcaaaagataaagaaagtgaaagacaagtcacaacccgggaaaatacatatgcaacacctaaacttaacaaaggaatattatcaaaaatgtgtaaactcctacaaataaagaagaaaaggataaatatcccaatagaaaataaaggccaacagcttaggcaacatggcaaaaccccatctctacaaaaaatacaaaaattagctgggcatggtggcacacacctatagtcctagctacttgggaagctgaggtgggaggatcgcttgaccccaggaggtcgaggctgcagtcagccatgattgtgccactgcactccagcctgggagacagagtcagaccctgtctcaatcaatcaaccaatcaatcaagtaaaataaagaccaaaagacacgaacaggtatttcagagaataaaaaaaatacataaggccaataaacagtttagaaggtgtcagcttcactagcaatcagaaaaaaagtcaaatcaagagaagaatattcaagaaatcatgttagcaaaatgatgttggcaaaaattaagaagttgaaccataatcattaagacatagattcacagcctccaagtacgaatgatcctccgacctcagccccccaagtaactgggactacaggtgcatgccaacatgcccagctaattttttttcttttttgtttttttcatttatttgtagagactgggttttgccatgttgcccaggctagtctcgaactcctgtgctcaagcaatccgcccatcttggcctcccaaagtgctgggattacaggcgtaagccaccccaccgggcccagaatgctttcttaatctaaaaactcccctaagtagccaggcgcagtggctcacgcctgtaatcccagcactttgggaggccaaggcgggtggatcacgaggtcaagagatggagaccatcctggcaaacatggcgaaaccccgtctctactaaaaatacaaaaattagctgggcatggtggcgcgtgcctgtattcccagctactcaggagactgaggcaggagaactgcttgaacccaggaagcagaggttgcagtgagccgagatcacaccactgcactccagcctgggcgacagagcgagactccgtctcaaaacaaaaacaaaaaccaaactcccctaagtagggctattttcctgtccctgatgccaccttgacaacataagtcaaccactgttccacatttgtcttttaggaacgccccaggactgtcggctgctgtccatggtgctgccttggtcagacacgtggtgtccaagctgctgtccgtggttctgctttcatttttctgtgtagcataatgatttttttgtttatttctttgtttaattaattgattttctctttttagaacagcgctaggtttgcaaacaaattgaacaaaaagtccatagactttttacatacccagcgcctctctatacatatacagtgtcacctactgtcattgtgcatctgtatggcacatttgttacaaatgatgagtcgatattgatacattatcattaactgaaatccgtagtttaccttagggttcactacttgtgttgtatagttcatgagttttgacaaatgtgcaatgtcacgtatccaccatggcagtgttatgcagaatagtatcccctatatttcactattcattcctcacccctcaccccaaaccctggcaactgctgatctttctactctctctgtagttttgcctttccaaatatatagtttggaaacgtacattatttagccttctccaactggctgctttcacttagcaatatgtatttaagattcctccatgcgttctgtggtttaatagttttttgtttttgttttttgtttttgatagggtcttcctctgtcacccaggctggagtgcagtggtgcaatcatatttcactatagcttcagcctcccaggctcaagcgatcctcttgccttagcctccaacacagctgggattacaggcaccaccatcatgctcattttttaatttttcatagagatggtatctggctatattgcccaggctgatctagaactcttgggctcaagtgatcctcctgtctcaacctcccaaagtgctgggatcacagtgtgagccaccatgcctgcccttgatagctcactttttattgctgaataatattccactgtccggatgtaccacggttaactgaaccattcacctgtgaatggtatcttagttacttccaagtttggcaattgcgaggaaagctgctataaaagctcacgtgcagatttttgtgtggacataagttttcaactcatttgaataaatacctaggagtgtgattgtatggtaagataagatttagcttttaaaactgtcaaactgtcttccaaagtggctgcaccatttgtattcccaccagcaatgaaagagagttctttatgcctcacatcctccacagcatttggcgttgagagctttttgtttcatttgttttctttgggattttctccattctagtagctggtcgtggtagctcattgttgttttcatttgccatcccaatggcacaccacgtggagcatattttcatgtgcttatttgccatccgcaagccttctttggtgaggtgtctgttcagatcttttgcccatgttttaattgggttgcttgttttcttattgtttaaatttaataatggttctttaagtgttttagatacaagtcttttatcagatatatattttctcctcccagtctgtggcctgcctttttcattctcttgacaatgtctttcacatgtagacattttttcattttaataaagctcagttaactaatttttctttttatacaaattgtgatttttgtgttatatctaaaaactcattgccaagcccaagatcatctggattttctcctgttatcttctaaaatttcatagttttaggctttacatttgggcctatgatccactttgagttgatttttgtgaaaagcataaggcctgtgtctagattctttttttttttttttttttttttttttttgctttggtgccatgtagtgaaaagatgacgctttctccattgaactgcctttgctcctttgttgaagatcagttgactatgtttatgggcgtctattatcagaaagttttgttctatggatttatttgtctatcctttcaccaattccacactcctgattattgtggcttcacagtaagtcttgcataaaagttgggaagagtcagtcctctaactttgttcttcttcaatattgtgttgtctcttctgagtactttcccttcccatataaactgtagaatcagtttgccaacatccataaaataatgtggtgggaatttgattaggattgtgttaaatctatatataaagttgggaagaactgacatcttaagaatattgtttttcttttcatgaacgtggaatatctctcgactgatttagatcttctttcatttcttttatcacagttttatagttttcctagtatatatcttgtatatgttttattagatttatacccaagtatttcagtttctggtgctaatttaaatggtattcggttttccactttaaatcccaattgttcattgctggtatatagggaaaaaatggcttttgcccattaaacttaacgtccttcaaatttgcttttaggccattcttgcgttgctataaagaaatacttgaggttgggtaattttttttttttttaaaagaggtttaattggctcacggttctacaggctgtacagaaagcatggcagcctctgcttctggggaggcctcaggaagcttccaatcatggcaaacagcaaagggagagaagccatatcacatggccgaagcagaagcaagaaagagactctgtggagggggaggtggcacacacttctaacgactagatctcgtctgaactctgagcgagagctcactcatcaccaaagggctggcacaaaccattcatgaggatctgcccccatgatttaaacacctcccagcaggccccacctccagcattggggattacatttcaacatgagatttgggtaggaacaaatacccaaactatatcattgctataatcacttattagttccaggaggttttttgtcgattatttgggattttctgcagagatatcatgtcatctgatgacaaacgcagcttcatttcttctcctccaatctgtatatcttatacttgcttttcatgttttaatgcattagctaagacttccagcatggtgttaattgggactggtaaggggacctactcacctgttgcttctcaccacgaagtacaatgttagcagtaggttttttgtagatgtcctttataaatttgagagtattcccctttattcaaagtttgctgagagtttttatgataaattgagttgtattttgtcagacacttttttgttatctattgatatgaccacatgagttttcttaatcttttgaagagatggattatattaattgacttttaggtggaaagcttatattaattgattttgaatgtccaatcagccttgtttctattactgagagttctccagattaacagaaccaatagaatagggtgtgtgtgtgtgtgtgtgtgtgtgtgagagagagagagagagagagacagagacagagagagagagagaattttaaggaattggctcacatgggtgtggaggcctgcaggtccaaaatcatcaaatcggtagtgtggaacctgacctagggaagagatgatgttccagcttgagtccaaagatcttctggaggcaaaattccatcttcctcaggggacctcaatctgtcttttttaatagtcttcaactgattggatgaggcccacccacattttggaggatgatctgctttacttaaagtctaacaacttaaatgttaatcctgtctaaaaaaataccttcacaacatccagactgatgtttgaccaaatattgggttccaagacctagccaagttgacaagtaaaatcagccatcatatttgcatacctgggataaatctcaatgggtatattattttttatacatggttggatttcatttgctagtatttcattaacattagattttacactgtcgatattgaaggtaagcaatctttgaaaaagactactagaactcacccatagctgtttttctccttcctttgactcctgctagactgtgtttcccagtgccatcacatgtggatggagacctgttaccagttctgttcaatgagtaatgtgaataagtcagacagtactttgaagagttgtgatgctgtaacaaaaaataatattatgtggctcatgcctgtaatcccagcacttcgggaagctgaggcaagaggatgatttgaactgagtaattcaagatcagcctgggcaacatagcaatactccatctctagaaaaaaaattaaaaattagccaagcatggaggcacatgcctgtagtcccagccaccagggaggctgaggtggaaggatcacctgagcctgcagaagcagagggtgcagtgagctgagatcataccactgcaccccagcataggtgacaaagtgagactctatctcaaaaaaataaaataaaaaacttgccttagaatatgagaagcagttagcaaggaagctggtgtcaggctggaggactgcagatccttgtcatgccttaataaatcagttgttaacatttggaaggcagagtccctgcctattcagcctgcagctctagggtaagagattgcaaaatcaagtattaagagtttgttggctactattagctcccttcattaattaactagagaaaagaggttaggtcagagaattggtggctttgtaagcaaaaattttaaaagaatagagaaaatccaaaacttacaaggagggagtggaaaagctggcttcttctagaacccaaacaagacaggacaccaagaaaggttttagatgatgaggatggccaaggtgtgatttgcagtgtggccttcccatccatggcctctttcacagataatctaatttttaatttattatttttgtggatacataataattatatattaatgtatttatggggtacacatgatattttgatacatgcctagaatgtgtaatgatcaaatcggggtagttaaaatatctatcacctcaaaatttatcatttctttgtgttggaaacatttcaaatcttctcttctagctattttgaaatatacaataaattattgttaactatagtcaccacactgtgctgttaaacactagaacttattccttctaaccaactgttttgtgtgtgtgtgtgtgtgttttttttttttttgagacagagtcttgctctatcatccaggctgaagtgcaatggtgcaatctcgactcactgcagcctccgtctcccgggttcaagcgattctcctgcctcagcctcccaagtaggtgggattacaggcacatgccatatgccctgctattttttgtacttttactagaaacagggtttcaccatgttgtccagattggtctcgaactcctgacctcaggtgatccacccacttcagcctcaaagtgctgggattacaggcgtgagccacaacacccaacctacccaattgtatttttgtatccattataccaacctctcttatctcctccccacagcagtgatccttcccagcctctggtaaccaccattctcctctctacctctatgagatccacatttttagctcccacatatgaaagaggacacatgatatttgactttctgtgcctggcttatttctctttaacataatgacctccctttccatccatgttgctggaaattataggatttcattcttttttatggctgaatagtattccattatgtatatataccacattttctttatccatttatccattgatggacacttaggttgataccctatcttagctattgtgaacagtgctgcaataaatatgggagtgtagatatatctccaaaatattgatttcctttcttttggatatatatgcatcagtgaaattgctgaattatatggtagttctatttttaattttttgaagaacttctacactgttttcaataatggctgtactaatttacattccaactagcagtgaatgagcattctcctttctccacatcctcatcagcatctgttcctttttgtctttggtaataactattctaaatggggtaagataatatctcattgtgatttcgatttgcatttcctagatcattagtaatgttgagcattttttcatgtacatgttggtcacacttgcatgtcttcttttgagatatgcatattcatgtcttttgtccattttaatgggatttttcttgttgtggagttgaattccttgtatattctgaatattagtcccttgttggatgaattttatcccatcaaaaagttgactcttcactctgttgactgtttccttgctgtgcagaagctttttagtttaatatagtcccatttgtctatttctgtttctgttgccagtcattttgaggtgttagccataaaatatttgcttatgacaatgtcctgtagtgttttccctatgttttcttctagtagttttataatttttagtcttatgtttaagtctttaatacattttagttgtttttttaattcagtgagagattgggacctagttttattcttctgcatatgaatatccagttttcctagcatcatttattgaagaggctgtcctttcccagcactttcattgaaaatcagtaggctataaatatgtggttgttttgtttctaggttctcaattctgttccattggtctgtgtctatttttataccaatgtcatgctgttttgtttcctatatcctcatgatatattttgaagtcaggtagtatgatgcttccagctttattctttttcctaagggttgctttggctatacaagctcttttttggtttcataataattttgggattgtttttccatttctttgaaaaaatgacattgatattttaatagcgattacattgaatctgtagattgctttggatagtatggtcattttaacaatattaattctcccaattcatgagcatggaaggtctttccatttgtttgtgtcctcttcaatttctttcatcagtgccttgtagttttccttgcagaagtctttcacctccttggtgaaatttatttatatggatttttgtagctattgtacatgggattgccttcttggtttctttttcagctagttcattatcagggtatagaaatactactgactttcatatattgatttgtatcttgcaactttactaaatttatttatcagacctaagagtttttggtggagtctttgggttttttcctttcagccagtatatatcttttaagtggaaaattctatctgtttacattcaaggttattattgatacgtggggacttatttctgccattttgttggttgttttcttgttgttttgtctatcctgtgttcctttctttctctcttattgtttatcattgtggcttggtggttcctgtagtggtaacatttgtgtcttttctcttcctctttttttgtatttgccgtgcggctgtaagttttatacatttatgtgttttcacgatggtagagatcatccttttgcttccaagtatagaactcccttaagcatttcttgtaaggccaatatagtggtgatgaatttccccaggctccagtggctcacataggtgctggctgtggtgggcaggatgggatgatcctttgccccacccagtaacagtagcagtgtgacgggagagcctgtcctcagggcatgtgaagtgcacagtggccctgctatggggtcactgcccgtggcatgtacttcagccctggaagcagcagcagcttcatcatagcttatttaattcagcggaccaagagcataaacacctgagcttcctctttttatctgctcattctgcttcccaagttctcaaggacttatgtggacagtcttcccgcacttgccaaaaactcagttcattctgttataaatctcagtgcctctacctgctacagacacggagctcaccccgtcagtggcaccccttctgacccagaagtgtccctaggtgtcttcgtggcctctgccatgggtgctggtatgccattgtgggaggtggggggcagtgggagtcaggaggttgctcctctgggtggagctgcctgccaatcaagatcctgactctacctccaccccatgtgaccaggctgcaggggcaggccttagtgggcaccggtggtgctctggtcacaagacaccctggaggtgaagggggccttccaattctaaagctgtagctgcagacttgggcagtgcaaatcctgtcaggaccaaacaccaaattctatcacccactcaagcttgaagttaagtgggagggagagagtccctgcaggacccttgctatagttggatgtttgtcccccaagacttcatgttgaaattcgacccccagtgttggaggtggagcctggtagaaggtgtttggattttgggtgcagatcccaaaatgctctcctttgagggtgagttctcactcttattcctgctagagctggctggtgaaaggagcctggcatctcccctctttcttgcttcctctctccccatgtgatctctgcacataccatggttcttgtacagcctgcagaaccatgagccaaataaacctcttttctttataaattacccagcttcaggaattcccttatagcaacttaatggacaaagacaacacctgacagccactctcccacatgcctccagcaatgctctgtgggtttgcacctccaactaagtcatttaggcaggatttaatggaaggacaccttgctgacacagatctgggctcagtgcaagagcccctgggacactgaggactccagagctggctccggcagagtgaagagtagcagaatatgccactttcaaacaagaataattttgagccgaagacaattaaaaagaagcatacccaagaaaaaaatccctgcccactccctttctaccaggaaaagcagaggattcttagtccttggagacaactctagatgcttatcagcccagagaaggcactagaggaatctacacaacaaactagcaagctatcttctgttagcttcccctatatatttacttcccagaatttgctgccctacaggttgaaagcccctttcctttgtcttgccaattctgtaaaaatgattgcccatttgctaagatgctccgtaagctcacgttccaaccgcccctttgaattcctcatctctgacggctcccacatagaggcataatgcacatgttagtaaacttttgtttgtttttctcatgttagtatcttgttaatctaattgacaagaccccagctaatgaacctaagatgggtagaagggggaaaaatgtttcttcccctacaagagcaagcacctccccacacactggaggaggagagagagccgctccgagatctgcaggaacagaggctccttgggctgtctgttgaggaaggcaataaggtccaggcaaccctgcaaggagagagccagggtcaccacttagcatcagcatccccttcctctgatctcctgcaggcagccagcccacccaaagagctgacccatccagcacccaaggagtgaggcaggccagagtccactccaagggcagaggctgtggggcaggtggggagccagcctggaggatgttagcagagccaggtgggtcatggcacccacagcctcggggatccagcttgagagagaccctgagggccaggctgataacagatgagttgtgatgacagggctcattgtcagacactgtaggctgtcaggctgtcaacctgagcagactaccaagtcttcccatccgcaaaacagctcaccccagctatcaggggtgggcacccagaggagagaccattctcatctccacctgaactcttttggtgctcccagaacattctgatgctgaagaggagtgtagaatcagatagaaacaattcctcttgtagcttccatgatggttggatggtaaagtacaactggctttgttagttcattttgcattgctgtagaggaatacctgaggctcagtaacttataaagaaaagaggtttatttggctcagggttttgcaggccataaaagaaccctggtgccagcatctgcttctggtgagggcatcaaggagcttacaaccatggcagaagttgaagggggagagagcatgtaacatggtgagagagagagcaagagagggaaagaggaggtgccaagctcttttaaacaaccagctcttgtgtgaaccagtagagcaaaactcactcatcaccaagaggatggcagcaaggccattcatagggatccatggcatgacccaaacatttccactaggccccacctccaacattggggatcacatttcaacaggagatttggaggggacaaatatccaaaccatgtcactccacactgtccccccaaatctcatgtccctctcacattgcaaaatataatcatcccttcccaatagtgcccaaaaaatctcaacttgttctaggatctactcaatcaaaactccgaagtttcatctgagactcaaggcatgccccttccacctatgaggctgtaagatccaaaacaagttgctacttccaagatacagtgatggtacaggcattgggtaaacatttcccttccttccaaaaggaataaattggccaaaagaaggagggggaagaagcaacaggccccacacaattctgagagaaagacattaaactttaaagctccaaaataatccttgactccatgtcctgcatccagggcacactggtgtgaggagcgggttcccaaggccttgggctggtctgcccccatggctttgcagagtgcagcccacatggctgctctcatgggttgtagttgagtgcctgaatcttttccaggctctgggcgcaagctgctggtggctctaccattcttgggtatggagggcagcagccccattcccagagctccactaggcagtaccccactggggactctgtgaaggggctccaaccctacattttccctccacactgccctactggaggctctgtgggagaactccacccctgcggcaggtttctgtctgggctcccaggctttcttttttgtctctctctttttttatttttatttcaatagttttaggtttttggttacatagataagttctttcatggtaatttctgagatcttggcacacttgtcacccaagcagtgtacgctgtacccaatatgtaatcttttatccctcacctccatcccccacttgccctcaagtatccagagtccattatatcattcttatgcctttgcatccttatagtttagctcccacttataagtgagaacatatgatgtttgtttttccattcctgagttatttcacttagaataatggcctccaactccatccagtttgctgcaaatgccactattttattcctttttatggctgagtagtatcccatggtgtatatataccacattttttatccactcattggtcaatgggcatttaggctggctccatatttttgcaattacaaggagttgcaattgcactgctctaaatatgtgtgtgcaagtgtctttttcatataatgacttatttttttctggatatcgaatagtgggactgctggatcaaatggtgattctacttttagttatttaaggaatctccatactgttttccaaagtggttgtactagtttacattcccaaccaggagtgtaaaactgttcccttttcaccatatccatgacaacatctgttagtttttaatttttaattatggtcattcttacagaagtgaggtggtatctcattgcagttttaatttgcatttccccaaaaattagtgatattgagcatttctttatatgtttgttggccatttgtatatcttcttttgagaattgtctattcatgtcgttcgcccactttttgatggtattttttttattgatgatttgtttgaattccttgtagattctggatattagtcctttatcagatgcatagtttgcaaatattttctcttattctgtgggctgtctgtttactctctgattatttcttttgctgtgcagaagttttttttgtctaattaggtcacatttatttatttatttatttatttttggttttgttgcacttgcttttgggttcttgatcatgaactctttgcctaagccaatgtctagaagagttttaccaatgttatcttctagaattttcatggtttcaggtcttagatttaagcctttcatccatcttgagttgatttttgtataaagtgagagatgaggatccagcttcattcttctacatgtggcttgccaattatcccagcaccatttgttgaataggacatcttttccccactttacatttttgtttgctttgtcaaagatcagttggatataagtatttgacttcatttctggattctctgttctgttccattggtctaatgcctatttttatacaagtaccgtgctattttggtaactatagccttgtagtatagtatgaatttgggtaatgtaatgcctccagatttgttcaccttgcttagtcttgctttggctatgtggggtcttttttggttccaaatgaattttagaattgttttttatatttctgtgaagaatgatggtggcactttgatgggaattgcattaaatctgtagattgtttttggcagtatggtcattttcacaatattgattctacccatccaagagcatgggatgtgtctccatttgtttgcgtcattgatgattgctttcagcagtgttttgtagtttttcttgtacagatcttttacctccttggttaggtatgttcctaagtattttattttttgcaggtgttgtaaaagggattgagttcttgatttgtttctcagcttggtcattgttggtgtatagcagtgctgataatttatgtacattgattttgtatcctgaaattttactgaattaatttaacagatctagaagctttttggatgagctttagggttttctaggtatgtgatcatatcatcagtgaacagcaacagtctgacttcctttttactgatttggatgggcacccagactttcctatacaccctctgaaatgtaggtaggagctgccatgcctccttcactcttgtattctgcccacctgtgggcttagcaccatgtggaagctaccaaggcttccagcttgcaccttctggagtggcagcctgagctgcacctgggactctttgagccttggctgaacctggagcagcaacctcccaagataccacagggaagcaaggccccagccctgacccccataacaatttcatcctcctaggcctctgggcctgtgatgggagagactgtcccaaagacttctgaaatgcctttaagacctttttctcattgtctttgctattagcatttagttgccttttagttatgctaatctctctagcaagtggttgctccataaggcatttgggttccttgcctgaaaaggctcttttcttctcaacctcatggccagcctgcaaattttccaaatgtttatgttctgcttaccttttaattataaattctaattttaagtcattttttttgctcccatatttgatttaggccattcaaagcagccaggttacttcttggatgctctgctgctttgaaatttcttccaccagataccttaggtcatcactgtcaatctcagcctttcagaaagccctggaacatggacacaatacagccaagctccttgctgggggcataacaagcatcacctttactccagttcctaataaattcctcatttctacctgagacctcatcggcctggcctttactgtccatatttctatcagcactttgatcacaactatgtaaccagtctctaaaaagttccaaatttcccctcatcttcctgtcttcttcctgggccctccaaactcttccaacctctgcccattacccagttccaaagccacttccacattttcaggtatctttatagcaacaccgcactccttgctaccaattttctgttttcatccattttgcattgctataaaagaatacctgaggctggataatttgtaaagaaaaggaagtttatttggctcactacaagctgtacaagaagcataatgccagtatctgcttctggtgaggcctctggaagtttacaatcaaggcagaaggcaaaaaaggagccagcataggacaggcatggtggctcatgcctgtaatcccagcactttgggaggccaaggcaggtggatcacttgaggtcaggagttcgagaccagcctgaccaacatggtgaaaccccatctctactaaaaatacaaaattatccgggtatggtggtgcacacctgtagtcccagctactagggaggctgaggcaggagaattgcttgaacccaggagacagaggttgcagtgagtgagccgagatcacaccattgcactccagcctgggcaacaagagtgaaactccatctcaaaaaaaaaaaaaaaaaggagccagcatgtcacatggtgagaatggtgagagggagaaagagagataagaaggaagtgtcaggtttttttaaacaaccagctcttgtgtgaactaatagagtgagaaatcacccatcaccaaggggatggcaccaaaccattcatgagagatctggccttatgaccccaatacctcccaccaggtctcacctccaacactggggatcatatttcaatgtgaaatttggaggggacaaacatctaaatcatatcaggaactccatggtactgctaacccccaaatctctaggggtgatattgagtgacatgcatggtactgaacgatacttggtcaggttctcccagtgaagcccaagcaccctcagggtacagggctgggaggcccaatcacaccagctcagcccaggacttggctgagtctgcccggtattagaaggtagcagacctagaactgggttgaacaagatcaggccactttgtgcatgttgccaaaggagaaactgaaggatcagaagtgggcagtaagttttcagtgagcccaggggtcataagtagcaaaatgtggaattcagtaaggggtagaggctggaagagttttgaggtgtgtgttagaaaaagcctaggtttccttgaagactatgttagaaatttggacattaaaggtgatcctggtgggggctcagaaagaaagaggagagctatagagaaaactcctgtcatcttggagaatacataaattgtcacgaacagaatgttgctagaaacgtgaatgttaaagatgcctctgctgaggctccagacagaaataaggaaggtgttattgaaaacgaaggtgacccttgtcatacagtggcaaagcacttggctgaactgtgttccgttttgtggaaagtagaaattatacatgatgaacttggatgtttagctgacgaagttcctaagaaaattgttgaaggcattcttgatttctccttgctgcttacagtaaaatatgagaagagagagatcagctgaagagggaagtgctgaggtggctgggtcagctgacccaagggcccttcaagctgatttaggctgctcaccttggtctcagaatcaccacggccatggccggtcagtcacaggtgatccagcagctgctgcaggccgagaagcaggatgccaagaaggtgtctggggcccacaagcaaaagaaccagaggctgaagcagcccaaaggagcagcttaggctgaaattgaacagcactgcctgcagaaggagaaagagttcaaggccaaggaagctgcagcactaggatctcgcagacccaggataaccatcctccagacctacttccagcagaacagggaagaagtcttagataaccttttggcctttgtctgcagcatccagccagaaatccctgaaaactatcgcataagtagatattaaaagagagaagcacctgttaaatggactggcactttagatgccctcatggaataagaagctctagttatattcttataagaagacattaacttatctctgtatattatagagtaggcccattcacttttcggagagaagcaaatccagtttctttgtacagacttagaatttatctaggctgggcatggtggttcacgcctgtaatcccagcattttcgggggccaaggcgggcagatggcttgagctcaggagtttgagacctgcctgaacaacacagtgagactgtgtctctacaaggaaatataaaaattagccagatatggtggtacatgcttatagtcctacctacttggaagagtgaggcaggaggatcacttgggcccggaaggcagaggttatagtgagccaagattgtgccactgcactccagcctgggtgctagagtgagaccctgtctcaaaaaaaaaaaacttaaagatttcatctttttacctcatgtttcttaggaatataatgggtaaatattgtctattttattatgccttttggctcaagcaatatatatacatatatatatatcactgttgatgttttctttcttgtatcaagtttaaaagaaaaagcaaaacaatcctttgaaaaaaggaaggaattaaatcattttttccttaatgcttttttgaaggtcaggggctttatctatgaaaaagtagtagtttctgtaacctgtgtgaagcatcagccagccttaaagtagtccattgctgctaataattagaacagtgaatattactagtataattgtttcagcttcttaatcaaaataactagatgatagaattcaagaacttgttacatgttattactcggtgtactactaatcatttaaaagtaaagcctatcatgcaaataaataaataaataaataaataaatacatgagaccagataaaatgaaggaagaatgactttgagatcagagccacaggtgaggaggctgttggggctgctgttgccaccttgggcccagagtgtggggccaccccagtgggcctggaagatggagcattaaccgaggaggatgaatcttgagacttaaatctaataaagggccaactagaagcccctagtgctcatcatcctcataaagaaagccagaaaagtcaatagacaactatattttaacgaaaataactgagggagagcactgagtgcatcagaggagtaacagaaaccctgataagcacagaaatgtgggctggccacatagaaaacagaaggaaacacacggcctccaccactccatcccccaaccaggattatctgggaatcaggaggaatttctgacatgaggaggtaagcaagaggatcccagtggcacccactaacacctcggacacctgcagacctcgccactggggtcccctgcagtttgcactggagggagttgcctggaggccacatagctgtgctctccaaaaaaggtgctgacaccgtaccccactcccacatggctagtgcttcaccacactggaataggaactatggctggagtgtgtcttacccaaggagtgagtagtcacagctccccttcatctctgaggctaagctgccactgaacaacccagactagtggtcccacgtccccaagtcaagctatgggcatctattaaacccttccccacagagccaagtggatcagctctacccactcctccccctgaccctttgagtccaagctaaagcagtttcttgcctcctagcaaaacaggactttggccatgcctttctagtgtctacgttgaagcagcaccctgcattccaggaactaatgccttggccacccagaaggtcacacactgcagtgcttaggctgaagcagcaacctgtatcctacagaaatggtgcctgggccactcagaacaatcacaccctctgatacataaatgcaggactttccttacagcagagaaggcctgagctgaagcaacacatcaccttctagggaatcagtgccctggcttaagctgagcagcagcacatcccaaggctgagctgatatagtaccctatgccccaggaaaacagagcagtggctaagctgagacatctcagcctacaggccaaacaactgtagtgccctgcttccctggagcttgcctaggcccctagggtctgagctgctgaggcaccctctccctgggaagtagaatcagcactgtgctgttccctgcctactccccaccaaggcccaaattacagctatgctctgccatcttgggatacttgctgacactgtacctggtctcacatagtctgggatcctgctgagccctaccatcctagggtctagagtcaataccatacagtgcctcatcccctgggaccaaagtttccattgtgccctattggctcagcttcccaaattgcagccataccatactccccaggtccacacctccagaacaccccttcttccccagagttggacaaatgctgcaccccccaggaatagactcacagctacaacctggccccttgagcaaaacctgttaaagggtacctcagagtcacagatcctagcactgtgagccacctaatccaaacctgccacagaaactgaacctacaccccaagacccagatgccacagtagattcttgaaaccaggagactaggactccagttgcacagctactctaattttctgcacctggaatccagcaccattgcagctgcacgttggccacattagacctgctaccaagagagagccccttgactaaatctcctcattgtggggaaacaagaagaggaggactacaaaagcccttgacactgagtacattaacctgtgccaccactacatccacaaacttctacagcctagtccactgaggtgcccacagttattgctgaggttgaatgcagttgaagaagacgcatggaagctatgccactgcacctattcagaaacagagtcatcacactttcccaaccaaaacactaaacccaactgcaggtgaaattgtttctctaaaaaacccactcttgaaagtttggaagaggtgactatttcgccagatgcacagacatcaatgcaggaacacaataaacatgagaaagcaaggaaatatgacaccaccaaaggaacataactctcattaatagacctcaatggaaaaagaaatcaatgtattgctggaaaaggaattcaaaataatgatcttaagataactcaataagatacaagaaaacagataaacaattcaatgaattcaggaaagtaatttacagtatgaatgaaaatttcaacagagatagaaataaaaaagaagcaaactaaaattctgcaggtgaagaattcaatgaataaaattaaaaaatacagtaatgagcttcaacagcagatatgatgaagcagaagaaaggaagagatagatcccaatacaataatagttgataacttcaacaccactctcagcactggacagataatccagacagaaagtcaacaaagaagcattcaatttaaaaagcactttagaccaaatgcatctaacagatatttacacaacatttcatccaacagctgtgaaatacacattcttttcatcagcacatggaatattctccaggataaaccatacagtaagtcacaaaacaagtctcaacaaatttgaaagaattaaaattatatcaaatatcatttatgaccacaataaaactcgaaatcaataagaggaacttttaagactgtacaaagacatgggaaattaaataatgtactcctgagtgaccaataggaattaagaagggaattttagaatgtcaacaaagaaaatgaaaatagaaatgcaacgtactagaatttataagatatagcaaaaagcagcattaagatggaagtttatggcaataaatacctacatcaaaaaagcagagagatttcaaataaatctcatccttgaaaatgcatgtcaaggaactaggaaatcaagaataaaccaaacccaaaattagtagaaagaaagaaataataaagatcagagcagaaataaatgaaattcagactaaaaaaaaaaaagatcaacaaaatgaaaaattgaatttttcaaaagataaacaaaaatgacaaataattagctagactaaacaaaaaagacccaaaagaatgaaatcagaaatgaaaacagaaacattacaactcatatcacagaaacacaaaggataattagagaccatacaccaacagattagaaaacctagcagaaacaggtatatttctggacaatacaacctaccaagactgaacccagaagaaatagaaagcctgcacaaaccagtcatgagcattgagattgaatctgtaacaaaaagtctcccatcaaaggaaagcccaaagaaattcctgttgaaataccaatgacattcctatcaaaatgccaattctacagtaatccaatggcttcagtggggaattctaccaaacactaaaaaaactaatacctattcttctgaaaatcttcccgaaaattgaagaggagggaattcttctaaattccttgtatgaggccactattatggtaattatgattatgattatgattatgtgattattattatgattccaaaaccagacaaggacacaacaaaaaaagcaaactataggctaaatactctgatgaagataatagatgaaaaccttcaaccaaatactagcaaattgaatccagcagcatattaaaaacattatttatcatgatcaagtgagatttatcccaggaatgcaaggatggttcaacatatgcaaatcacatcaacagaatgaaggacaaaaaccgtattatcatcataacagacacagaaaaagtatttgataaaatccaacatcccttcataaaaattctcagcaagttaggtatgaaaggaatatacctcaacacaataagagctatatgtgacaaacccacagccaacatcatactgaacatgcaagagttgaaagcttttctctaaaatctggaacaagccaatgatatcaggccagatgtagtggctcatgcctctaattctagcactttgggaggccaaggcaggaggatcacttgagcccaacaaaggaaacaatcaacagagtgaaaagacaatctacagaatgttagaaaatatttgcaaactctccatccaacaagggactaatatttagaatacattggaaactcaaacaactaaacagaaaagaaaacaaatttttttattaaaaataggcaaatgaaaaaatatttaaaagtttttaaaaccaaaaaaggaactgaatagacgtctctaaaaggaagatatacgaatggccaacagacatatgagaaaatgctcaacattactaatcataaggaaaatgcaaattgaaaccacaataagatataatctcaccccagttaaaatggctattattaaaaaaggcaaaaaacaattgctgtcaaagattcagagaaaggggagctttaatgcattattggttgaaatcttgtctttggaattagcacagccattgaaaaacaataaagagcttcctcaaaaaatggaaatgagtactgccccatgatcccaccatcctctaccgggtatttatccaaaggaaatctatgtcaaagagacatctacactacatgttcattgcagcactattcacaatgccagtgttggaatcaacctacgtgtccatcaacagatgaatgcataaagaaaatgtagtgtttatacacaaacacacacagagagagagagagagaggaattctattctgccatgaaaaagaatgaaatcttgtcatctgaggtaacatggatgagcttggaggacatgttaagtgaaataaagctagacacagacagccaaatatcacatgttctcactcatatatggaagccaaataagttgatctcatagaaatagggagtagaatagtggtaaccagaggctgggaatgggaggggataggatagctagaagtcgattaataaataaaaaattacagtcaggtaggaggaataggccccggtgttctctaacaccatagggtgactataactaacaacaatttattgtatattttcatacggctagaagagcaaattttgattgttcccagcacaaagaagtgataaatgtttgaggtgatggatatgctaattgttgcaggaagtcagggaccccgaatggagggaccagctggagccatggcagaggaacataaattgtgaagatttcatggacatttatcagttcccaaataatacttttataatttcttatgcctgtctttactttaatctcataatcctgttatcttcataagctgaggatgtacgtcacctcaggaccactgggataattgtgttaactgtacaaattgattgtaaaacatatgtgtttgaacaatatgaaatcagtgcaccttgaaaaagacagaataacagcgatttttagggaataagggaagacaaccataaggtctgactgcctgaggggttgggcaaaaagagccatatttttcttcttgcagaaagcctataaatgaacgtgcaagtagggaagatatcgctaaattattttcctagcaaggaatattaatactaataccctgggaaaggaatgcatccctgggggaggtctataaacggccgctctgggaatgtctgtcttatgtggttgagataaggactgagataaggactgagatacgccctggtctcctgcagtaccctcagcttattaggggggtgaaaaactccaccctggtaaatttgtggtcacactggttctctgctctcaaactctgttttctgttgtttaagatgtttatcaagataatatatgcactgctgaacatagacccttatcagtagttctgtttttgccctttgccttgtgatctttgttggacccttatcagtggttctgcttttgccctttgtcctgttccctcagaagcatgtgatctttgttagacccttattagtagttctgctttttgcctttgaagcatgtgatctttgtacccactccctgtgcttacaccccctccctttttgaaacccttaacaaaaaacctgctggtttgaggctcaggcggtcatcacagtcctactgatatgtgatgtcacccccggctgcccagctgtaaaatcctctctttatactgtctctctttatttctcagctggccaacaattatggaaaacagaaagaacctacattgaaatattgggggcaggttcccccaatactaattatcctgatttgatcatcacccattgtatatatgtatccaaatatcacaatgtaccccaaaatatatacaattattatgtgtcaattaaaaacaatcataaaacttttaaacagctaaaataaaagtatattgttttcttcaaaaaaaatctaatgcagttttccctactaggttttgggcttgcttaggacccatggctcctctctcccttccaatgtatcccttttggaataggaatgtccatcctatgcctgccccatcattgtactttggaagcagataacttcttgtcaagttacaaaggtccacagatggagaggaatttcaccccagaatgaatcaccctgcatttctcccacacttgatgcaggtgatatgtcgctgagattgtggactaagagttggtgctggaaggggttagccatcgtggagatgttgctatgggatgcagggattttgcctgtgagaaggacatgattatggggggagcggagggcaaactgtcatgggttaaaatgtgtcccctataaattcatgtgttgaagtcctaacccccaggaccacagaatgtgaccttgtttggaaacagtctttgcagctgcaatcaagttcggatgaggtcaccctggagtagggcaagcctctgatccaatatgactgctgtcctcatgaaaagggggaatctgggcacagacgcacgtgtggagaacgccctgtgaagatggtgctgcttccacaagccaagagcagcagagacggccggcaaagcccagcagcaaggagagagcctggaacagagtctccatgacacagaggagccagccccaccgagacctccatcccagatgaccggcctccagaaccaggacggaataaacgtctgttgtttaagccacgcagtctggggtgcagtgttgccagggccgcacttaacggatacgagtgttgtcctgagctgccagccccacagactgcacaaggcctccctgccccagccaagtgcagtctccccagccccctgggtgtgccatgggcagtgtggggcccatcactccgtcctcccccaggctgggaggttgagcccattatgagctccatggggtgaagctggagcgagaggctgggagccgactgggagcccgcggctggaggatggatttccccagggacccacacgtgcacctccacctgtctcctggacgttctctctgagggcagggctggtgccagctcagggatccagcagggacagaagggcgggccgggtccttgtggagagcacatttagtgggagggacatgatttcccctcacaagtgtccattcttcctgttccttgctggacgcttcctcttccattctggacacttcctgtgcgacacctcctcgggctttcccgaggccctctggcctcattccgttccctgctacctcccacttccacgtacgtccttgcccagctcttccctctatccagagcttctgcctggcaaggtccctgctgagatcagtccaggctcccccagcacaggtaggagccttgcacatgcccttggacctccccaccctgcatgatgccagcatccccaggccccagggaggccccatttctctctctgctggtagtccagtggccctggagtcccactgcaggtggggtgtgcccctgaactctgaggaagctaagtaccctgccctcagacaggctatcccccctgctcagccccagggccctgccccctaccccttcccctcacctgcaccacaggctctggccaactctgcccaggccctgaatgggcccctctggctcccctctgctgctacactgccctgcaccacctccactcagcctcagtgtgttcatccgcctgtcccacgtcccctcggcccccaggagcacagctggtggccctggctcctcgcagcccatcttgttccttctggagcaccagcctcagaggccttcctgtgcagggtccactcggccagccctgggaccctcctggtctcaagcacacacattctccctgcagccagacctgcccctgcctgtgagctcagacctgagccttggaacgccttcccttctccatcccagctcgcctttgccagctgctcagcaggatgaactcacactcccctccctgcaccatgagtgagagtcagctggagagatgcccaggcaaaagcagccaccagggcccagtgggggccagaagcttcagatgagaggcccaggtattgagaggctgagaccacgggcagaatggtcataatcgttgccagtctcagtccagccccagggactcagagacagagaaaagagcagcacacaaggtccgggctccccaccttctcccgtgagtacgggggagtatgggggcagccaccacccccatccccacacacccatgaggcagcctcagctgtgtctggactccccctcgccctctgacacagaaaccaccagaagaaaagggaacttcaggaagtaagtggtgccgccggtttcaatcctgttcttagtgtttgcagcgtggagttcacacccctggggacctgggggccgagctgtgatttcctaggaagacaagtggcagctgacagcgtgggcaaggctgcccacatgtacctcgccacaacaggaagggctgagacccccacctcggtgagtggggtcagcacagggcaggagcacaggctcaggagaaggacagagcctgggcgcagccatcggcgcttctggacctgagctgctgaacaggctgcaagaggctggggagaggctggggcgaggccagccccacatggaagcctaagcggagccagcacaggggaggtgggcagccttcaggcaccgatgcccacccagtgcgagacgacagggaccgtgggcaggggcttccaagccaacagggcaggacacaccagaggctgactgaggcctccaggacgaccgggctgggagtgtgaggaacatgacgggatggggcagagccagccatggggtgatgccaggatgggcatgaccgacctgagctcaggaggcagcagagagagggaggaggagaggccccaggtgaaccgaggggcttgtccaggccggcagcatcaccggagcccagggcagggtcagcagagctggccgtagggccctcctctcagccaggaccaaggacagcaggtgagctgggagcagagcagggagggtgagtgtggcagcaggacaggagggtggaagccaaggagcccagaggcagaggcagggacaggggaggcacaggggctgggctcagagccagctgatggggttggggcacctgctggccgggagcagggctgtggtcagcagcggagaggaggggagagctgtgctgagtgcacgggcgggaggagggaagagtccagggaggcccagaaaggcccagagtgcagcaggcctggggcgaggggaggggctgaggctccgtgcgttcagggaactgacccagcagagcagaggccactgaggagctgaggttctggagaggcttccagagcaggagcagtgcagggacgggaggatccgggagctcatccaggaggggcacatgggcaagggcaaggggctctgttggggagacctgactggacactggggctgctccacagcatagggaacacgccaagtgctgcaaaaacaaaaatgaggcaagaaaaacagcctaaacctggacagagggtgccaggacaggcaggggggcaacagtggaccgagtgacgttgctgccccaggttgagggagggcagagtgagcagggggcaggcattggagttcaggggaccaggaccaagcagccacaggtgcacagggcaggtgggaggcaggaagaacagggggcagctcctggagctcaggggaccacgggagagcatctgaaggtgaacaggagccggtggaggggcaggatgagcaggaggaagaccctggagctcaggggaccagggcagagcagccacaggtgaggaggcagccacaggtgcgcagggcaggtgggaggcaggaccagcagggggcagcccctggagctcatagagccagggcagagcagttgcaggtgagcagggctcagtggaagatgggcaagcagggggcagctcctggagctcagggcaccagggcagtgtagccacaggtgagcaggggctggtgggaggcaggacaagcaggcggcagctcccggagctcagggaaccagggcagtgtagctgcaggtgagcaggggctggtggaaggcaggacaagcaggtggcagctcctggagctcagggaaccagggcagtgtagctgcaggtgagcaggggctggtgggaggcaggacgagcagggggcagcccctggagctcaggggaccaggggagggcatcagaaggtgagcaggggctggtgggaggcaggatgagtaaggggcagcccctttagctcaggggaccagggcagagcagcctcaggtgagcaggggcaggtgaggggcaggacgagcagggggcagtcctggagctcaggggatcagggcagagcatcagaaggtgagcatggctggtgggaggtgggcgagcagggggcagcccctggagctcaggggaccagggcagagcagtcgcaggtgagcacgggttggtgggaggtagaacgagtagggggcagctcctggagctcagggaacaggggagaacatcagaagatgagaagggccggtgggaggttgcagagcagggggcagcttctgcagctctgccagccagggcagagcagctgcaggtaagcagggctggtgggaagcaggggtagcaggtgggcagcccctggagctcagagagccggggaagatcatcggtaggtgagcaggggctggtggaaagcaggaggagcaaggggcagctcatggagctcagaggaccagggaagagcagccacaggtgaacaggggcaggtgggcggcagaatgagcaggggcagctcctggagctcaggggacaagggcagagcagccataggcaaacaggagcagggtcaggggacaggaggagcagggggcagctcttggagctcaggggaccagggcagagccgctgcaggtgagcaggggcaggtggggggcaggaggagcagggggcatctcctggagctcagagcaccagggcagagcagccacaggtgagcagggacggtgggaggcagcacgcagctcctagactttggcaggagctgggtagttgccggcagcagacagctgagggctggtgaaagtgcagtgcagcctcctggtgccgggaagggagtgtgagtccatcccactgagcagttggcaagggcgagctgggatggagaagggaaggcgttccagggctcggggctgagctctcaggcaggggcaggtgtggctgcagggggaacgtgtgcttgagaccaggagggtcccagggctggccccagcggaccctgggcaggaaggcctctgaggctggtgccccagaaggagcaagatgggctgccaggagccaggaccatcagcacaatgaagctgagtggaggtggtgcagggcagtgtagcagcagagggcagccagaggggcccattcagggcctgggcagagtcagccagagcctgtggtgcaggtgaggggaaggggtggtgagcggggccctggggctgagcagaggggatggcctggctgagggcagggcgcttagcttcctcagaggtcaggggcacaccccacctgcagtgggactccagggccactgggccagcagcagagagaaatggggcctccctgtggcctgggggtcctggcaccacgcagggtggggagggccaagggcaggtgcaaggctcctacctgtgctggggggcctgggttgagcccagcagggaccttgccgggggaagctctggagagagggaggaggtgggctggtggctgagaaggccaggccagggctgggagggtgacggtgtggtgactgagcctccagaagtaatgcaggacactgggaggcagggggcatccaggcactcagggccctgacctgggctgctgcacactggggctaaggggaaaggaggggagaggctgaggaggaggctcccggggcgatattccaaggcagggggttccggggccctggggctgaagggcgccgaccctatgcagtgtctggcccctctgctgcacagaagaaaagggccttggagggcagagggcaggctatgaccagggccctgggcaagtcaggcccactcactagcggagggccacgctggggcggcagggtcaggagcttcaggggactcaggggacccacgagaagccatctgagaacagtgtccactggtcaagccaggcacccataaaaggctggagtggggccaatgggcatgagccgtccctgaggtggcaccgatggccagagctgaggccaagctagaggccctggactgtgctgactcccggcagacacagagcgctgacctggctgccgagccccgcctcctaggctgcaggggtgcctgcagaagggcaccacagggccaccggtcctgcaagctttctggggcgggccgggcctgaccttggctttggggcagggagggggctaaggtgaggcaggtggcgccagccaggcgcacacccaatgcccgtgagcccagacactggaccctgcctggaccctcgtggatagacaagaaccgaggggcctctgcgccctgggcccagctctgtcccacaccgcagtcacatggcgccatctctcttgcagcttccaccaagggcccatcggtcttccccctggcgccctgctccaggagcacctctgggggcacagcggccctgggctgcctggtcaaggactacttcccagaaccggtgacggtgtcgtggaactcaggcgccctgaccagcggcgtgcacaccttcccggctgtcctacagtcctcaggactctactccctcagcagcgtggtgaccgtgccctccagcagcttgggcacccagacctacacctgcaacgtgaatcacaagcccagcaacaccaaggtggacaagagagttggtgagaggccagcgcagggagggagggtgtctgctggaagccaggctcagccctcctgcctggacgcatcccggctgtgcagtcccagcccagggcaccaaggcaggccccgtctgactcctcacccggaggcctctgcccgccccactcatgctcagggagagggtcttctggctttttccaccaggctccgggcaggcacaggctggatgcccctaccccaggcccttcacacacaggggcaggtgctgcgctcagagctgccaagagccatatccaggaggaccctgcccctgacctaagcccaccccaaaggccaaactctctactcactcagctcagataccttctctcttcccagatctgagtaactcccaatcttctctctgcagagctcaaaaccccacttggtgacacaactcacacatgcccacggtgcccaggtaagccagcccaggcctcgccctccagctcaaggcgggacaagagccctagagtggcctgagtccagggacaggccccagcagggtgctgacgcatccacctccatcccagatccccgtaactcccaatcttctctctgcagagcccaaatcttgtgacacacctcccccgtgcccacggtgcccaggtaagccagcccaggcctcgccctccagctcaaggcaggacaagagccctagagtggcctgagtccagggacaggccccagcagggtgctgacgcgtccacctccatcccagatccccgtaactcccaatcttctctctgcagagcccaaatcttgtgacacacctcccccatgcccacggtgcccaggtaagccagcccaggcctcgccctccagctcaaggcgggacaagagccctagagtggcctgagtccagggacaggccccagcagggtgctgacgcatccacctccatcccagatccccgtaactcccaatcttctctctgcagagcccaaatcttgtgacacacctcccccgtgcccaaggtgcccaggtaagccagcccaggcctcgccctccagctcaaggcaggacaggtgccctagagtggcctgcatccagggacaggtcccagtcgggtgctgacacatctgcctccatctcttcctcagcacctgaactcctgggaggaccgtcagtcttcctcttccccccaaaacccaaggatacccttatgatttcccggacccctgaggtcacgtgcgtggtggtggacgtgagccacgaagaccccgaggtccagttcaagtggtacgtggacggcgtggaggtgcataatgccaagacaaagccgcgggaggagcagtacaacagcacgttccgtgtggtcagcgtcctcaccgtcctgcaccaggactggctgaacggcaaggagtacaagtgcaaggtctccaacaaagccctcccagcccccatcgagaaaaccatctccaaaaccaaaggtgggacccgcggggtatgagggccacatggacagaggccagcttgacccaccctctgccctgggagtgaccgctgtgccaacctctgtccctacaggacagccccgagaaccacaggtgtacaccctgcccccatcccgggaggagatgaccaagaaccaggtcagcctgacctgcctggtcaaaggcttctaccccagcgacatcgccgtggagtgggagagcagcgggcagccggagaacaactacaacaccacgcctcccatgctggactccgacggctccttcttcctctacagcaagctcaccgtggacaagagcaggtggcagcaggggaacatcttctcatgctccgtgatgcatgaggctctgcacaaccgcttcacgcagaagagcctctccctgtctccgggtaaatgagtgcgacggccggcaagcccccgctccccgggctctcggggtcgcgcgaggatgcttggcacgtaccccgtgtacatacttcccgggcacccagcatggaaataaagcacccagcgctgccctgggcccctgcgagactgtgatggttctttccacgggtcaggccgagtctgaggcctgagtggcatgagggaggcagagcgggtcccactgtccccacactggcccaggctgtgcaggtgtgcctgggccgcctagggtggggctcagccaggggctgccctcggcagggtgggggatttgccagcgtggccctccctccagcagcagctgccctgggctgggccacgggaagccctaggagcccctggggacagacacacagcccctgcctctgtaggagactgtcctgtcctgtgagcgccctgtcctccgacccgcatgcccactcgggggcatgcctagtccatgtgcgtagggacaggccctccctcacccatctacccccacggcactaacccctggcagccctgcccagcctcgcacccgcatggggacacaaccgactccggggacatgcactctcgggccctgtggagagactggtccagatgcccacacacacactcagcccagacccgttcaacaaaccccgcactgaggttggccggccacacggccaccacacacacacgtgcacgcctcacacacggagcctcacccgggcgaaccgcacagcacccagaccagagcaaggtcctcgcacacgtgaacactcctcggacacaggcccccacgagccccacgcggcacctcaaggcccacgagccgctcggcagcttctccacatgctgaccagctcagacaaacccagccctcctctcacaaggtgcccctgcagccgccacacacacacaggcccccacacacaggggaacacacgccacgtcgcgtccctggcactggcccacttcccaatacagcccttccctgcagctggggtcacatgaggtgtgggcttcaccatcctcctgccctctgggcctcagggagggacacgggagacggggagtgggtcctgctgagggccaggtcgctatctagggccgggtgtgtggctgagtcccggggccaaagctggtgcccagggcgggcagctgtggggagctgacctcaggacactgttggcccatcccggccgggccctacatcctgggtcctgccacagagggaatcacccccagaggcccgagcccagcaggacacagcactgaccaccctcttcctgtccagagctgcaactggaggagagctgtgcggaggcgcaggacggggagctggacgggctgtggacgaccatcaccatcttcatcacactcttcctgttaagcgtgtgctacagtgccaccgtcaccttcttcaaggtcggccgcacgttgtccccagctgtccttgacattgtcctccatgctgtcacacactgtccctgacactgtccccaggctgtccccacctgtccctgacactgtcccccacgctctcacaaactgtccctcacactgtcccccatgctgtcacaaactgtcactgacactgtcccccatgctatccccacctgtccctgacactgtccctgacactgtctctcatgctgtccccactcatctgcgacactgtaccccacgctgtccccacttgtcctcaacaatgtcccccatgctgtccccacctgtccctgatgctgtcccccacactgtcccaatctgtccccaccactctcccccacgctgtccccacctgtccctgacactgtcccccatgccatccccatctgtcccgacaatgtccccagggtgtccccagctgtccctgatgctgtcccccacactgtccccacctctccctgacgctgtcccccacgtggtccccacttgtccctgatgctgtcccccacactgtccccacctgtccctgacactgtcccccatgccatccccatctgtcccgacaatgtccctatggtgtccccagctgtccctgatgctgtcccccacactgtccccacctgtccctgacgctgtcccccacactgtccccacctccccctgacactgtcccccacactgtccccacctctccctaacactgtcccacacactgtcccctcctgtccccaacactttcccccatgctgtccccaccagtccccaacactgtacaccatgcttttcccacctgtccccaacactgtcccccatgctgtcccctcctgtccccaacaatgtcccccatgctgtttcctcctgtccccaacactgtccgccactctgtttcctcctttccctgacactgtcccccactctgtccccacctgtagccaacactatcccctacgctgtctccacctgtccctgatgctgtcccccacactgtccccactcctccctgacactgtcccctatgctgtccccaccggttcctaacactgtcccccacactgtccctacctgtccccgacactttctcccatgctgttcccacgtgtctccaacactgtcccccacacagtctccacctgtccctgacactgtcccccatgctgtcctcacccatctctgacactgtacacatactgtccccacctgtccctgatgctgtcctccatgatgtccccacctctccctgacactgtcacccatgctgtccccacctgcccctgacactctcctccacgctgttctcacctgtccccaacactctcccccacactgtctccacctgtccctgacactgtcctccacgctgtccccacctatccctgacactgtcccccatgctgtcctcacctgtccccaacactctcctccacactgtcctcacctgtccccaacactctccccccacactgtctcaacctgtccctgacactgtcccccatgctgtcctcacctgtccctgacactgtcccccatgctgtcctcacctgtctctgacactgtcccccgtgctgtccccacctgacactatcttctgtgctgtccacatgctgttgctgccctggctctgctctccatgtccaggcctcagagcaggcagtggtgaggccctggcacatgggtggcatgaggggccggataggcctcaggggcagggctgtggcctgggtggcctgaggggtgagcaggcctcgggggcagggctgtggcctcgctcacccctgtgctgtgccttgcctacaggtgaagtggatcttctcctcggtggtggacctgaagcagaccatcatccccgactataggaacatgattgggcagggggcctagggccaccctctgcggggtgtccagggccacccagatcccacacacgagccgtgggccatgctcagccaccacccaggccacaactgcccccgacctcaccgccctcaaccccatggctctctgtctttgcagtcgccctctgagccctgacacgccccccttccagaccctgtgcatagcaggtctaccccagacctccgctgcttggtgcatgcagggagctggggaccaggtgtcccctcagcaggatgtccctgccctccagaccgccagatgctcacacaaaaggaggcagtgaccagcatccgaggcccccacccaggcaggagctggccctggagccaaccccgtccacgccagcctcctgaacacaggcgtggtttccagatggtgagtgggagcatcagccgccaaggtagggaagccacagcaccatcaggccctgttggggaggcttccgagagctgcgaaggctcactcagacggccttcctcccagcccgcagccagccagcctccattccgggcactcccgtgaactcctgacatgaggaatgaggttgttctgatttcaagcaaagaacgctgctctctggctcctgggaacagtctcggtgccagcaccaccccttggctgcctgcctacactgctggattctcgggtggaactggacccgcagggacagccagccccagagtccgcactggggagagaaggggccaggcccaggacactgccacctcccacccactccagtccaccgagatcactcagagaagagcctgggccatgtggccactgcaggagccccacagtgcaagagtgaggatagcccaaggaagggctgggcatctgcccagacaggcctcccagagaaggctggtgaccaggtcccaggcgggcaagactcagccttggtggggcctgaggacagaggaggcccaggagcatcggggagagaggtggagggacaccgggagagccaggagcgtggacacagccagaactcatcacagaggctggcgtccagccccgggtcacgtgcagcaggaacaagcagccactctgggggcaccaggtggagaggcaagatgccaaagagggtgcccgtgttcttgcgaaagcggggctgctggccacgagtgctggacagaggcccccacgctctgctgcccccatcacgccgttccgtgactgtcacgcagaatccgcagacaggaagggaggctcgagcgggactgcggccagcgcctgcctcggccgtcagggaggactcccgggctcactcgaaggaggtgccaccatttcagctttggtagcttttcttcttcttttaaattttctaaagctcattaattgtctttgatgtttcttttgtgatgacaataaaatatcctttttaagtcttgtacttcgtgatgggagccgccttcctgtgtccacgcgcctcctgcccccggtgggaagcacattcaggaggaggctggtccagctgcacctcgggggctccctgcatacgccccccgcctcctgcagccacacgcattgcccgagcgaccctccctggcccctgtcgctacatggacccccggggcttctcctcttttctacatggatgcagtttctcctcctgctgggcacggtgctgcctgccctggtcactctgcgggggacagggcctccagggaaagctgggtcgaggctgggagctggctcaggctggccaggcagagccacagggagggccttccagaaccaaccatggtccgaagcgagaggtgggtgtcagatctgtgtgcgtcagctcaggaccacagcggggcggctcccacagcagacatggatcctcccaggcctagagaccaggaatctgagatcaggatgcaggcagggctggtttctctcaagccctctctccttggcttgtagacaccgtctcctccctggtcctcacgtggccatccctctgtgtgcccgtgtcctaagcttctcttcttataagaacacacatcagattagattagtgaccccctatgaacttaatgacctctgtaaagaccccatctccaaatagtcacattgtgaggccagggattaagacttgaatatatgaatttgtaggggccacgatttaacccatcacagtccagactctggcccccaaaattcatgttcttctcacatgcagaatacattcatcctgtctcagcatccccctgggcactaggtcatgtagcaaggacggattttcaacagaaataactattgcaacagaagaaagagtccggcatgacctggactcaccttcatctgtgcagaggccacagccttgtaaagggaggtggtagggggagcagggtgggtgctcggggctcagtcgtcggggaagggaaaagttgcccagcgctggtcagcgtccccgggatgggacccgctgtgtccgtgccggccactgttgaggtcaggattctgtcctcccagagcctggagacacaggccccatccttcccaatggggacacttcagggagcggctctcaggtcccgagaaagaccctcctgggtcacaggaaatgcacagacatcgggaacagacagaaggacgtgtggttgcggccctctcagcagataccctgagaaagggaggtcggggttggtccaaacggtgagttctggtgcacggagctttctcaggcaggtgttgacggggcaggggtcggcctaggggtacggccagaagctgttagaaactgttagtgtctgctcaagtctttacaagccaaggttgaggccgagtggagaggctccgaggagcctggctggaactcagtcaaggacagggtcttgttactgcagtggctgcggtggctgcggtggctggaaaatgccgtcggagttgcctgtggcaggagagagaccatctcacccaggaaggaggagtggttggattcgtttgtgtggcatcgagcagctggagcttcaccaaacacagagttggggactaaatccccagactccaggccctgccatgccgtgggaaggctcgccactggagggtgggctccagggggcctggcctgaactgggtgctgaagcccagccctttaactctcaggacacgctgctgcagccccgcggggggtgagggagacagcacctggggtgcagggcgggcagctgctgcatcaccggctctatcccaagcccaaggatggcgtcccagagatgcaggagagctttgtccagagaaggtgccagccctcagggaccctgctggagagatctccaccctctgcccttcaaggggccctacgggcttccgggtgccctggtggggtgggctccagtccactgtctgaggatggacggcctggccaggataaggaaaggaaacccaggacggtgccgggctccgggtcattccgtgcactgagcaggctgagttgggaagaagcagatgcttcctgcagctcctgcccctgcagggcctggcgcctggaccaggttcccctggggaaattgggcccctccctgagccacccggggcccaccgccccctttccacctgggaccgagcatcctccagagggtcagccctcctgagggaacaccatgcccagccccaggaccctccctcaactctccagcaaggctgcactgtgggcggcccctgcacataccccagcagtccatgctgtgatgtaacatgacatggtgtgacgtggtgtgatgtctctggtgtgacgtggatgtcatgtggcatgatgcgacaggacatggtgtgatgttgtatgatgtggtatgacggtgtgatatccgaggggtgatgtgatgtggtgtgacatggtgtaatgtccctggtgtgaggtggcgttggacatgctgggatgtggtgtgacacagtgtgacatccctggtgtgatgtggtgtgatgaagcgtaacaggctgtgacatagtgtgacgtggtgtgatataatgtgatgtggtgtgaggtggcgtgacatggtgggatgtggtgtgacatggtataatgtccctggtgtgaggtggtgtgatgtggtatgatggggtgtggcagggtacgacatccctagtgtgatgataagtttcatggtatgatgtggcgtgacatccctggcgtgacataatgagatgtggtgtgacatggtgtggcattcctggtgtgactcctgtgttctgacatttgtggccaccccaggatacagaggtccctgtagccaagggaagggggagaatagaaccatctgagcatgttgacctggaggaattggtggcccttgagtccacgaagcccaccctgccaggtgcccctgccccacgtgacccaagtgggcttgcagagcagcaagcaggactctggttagactgcaagaaggacctgccaccacgtggccttgtgaggagacacagagcaaggcagtgacctcagcgtccacccagcacagggtgctgctgaagctcctcctgtcctctcagcagcggtctcagagcaaggcccaaggcaggctgaagagaggggcagagggaggatgctggggaggcaggggtgaggggagtgagagcccaggtttcagctgagcccctgcacagggaaggaggctagctgaacacccatctccccacacactcccaaccctgcctctgcccgaacacctcccagaaggcacctcaaactctgctacccacactcagcaaggggtatggtgtccccaccgagtccagccagtgaggcccggcacagccatgcctgtgccgaccactcccatggccaagctccctgctaacatggtaggacagagccaggcctggaggagacagaacatcagtcccatggggaagctccctgctcacatggcagggccgggcctggaggagacagaacgccccgtctggtatggtactcaggctgcacatgcctgccacgcacgggggccatgtggcacacacgggtactcacacggtcctcacacagggacacacgcacttgcaaccccagcacccacccagtgcactcatgcacgggctccccaggtgggtcacagtctcacgccttgagctactccatgtgccaggcccttcacccacattcccgtccccggtgccagctgttgagccacaccgtcttctctgtggatccctcccagcccgctcagcacaatggacatgctctctccagtccagcaactgcactggcctcttcccctcagaatccacgtctggccatctcccaggaaacccggaccaccacgggcagggaccaccttctcactgtccatgtggaccaccccacacctgaccccaggcagagtcacactacgacctgcttcaatattgaaaaggggaaaagctggaggaggggaaagatgaaagagaaaaaagcaagaggggagggtcacattcttgtgaggctttgattagagttcactgagcccccacgttgcatgaaaaggaggggtggagggagcaattacgcattcgccttgtgctcagtaaatctgcactttataagcaaataaacagagtagaggaagaagtcaaatatgcattcgtctcaggggtaggaggaacgatttcttgtctcattttgtcccatgtcatgaagaccggcctgttaatttatattctcagggtgagggaggccacctgggtagacctggcctatctgctgctgctatcactttggaaacaaaaggaaaggcatgactttttttttttttcatgactcagcttcccacctcaactgttcattttggcatagtgagtttggagtcctgagattttattttcctttcacaatggtcaaggtcgcaccctcagtattcaggagagctggtccaacccagacccctgccgtccctggacgcttttcaaatacgtgctgcagtctctgacactctctcaccatggtagaaactgaggtcttggtgagcctgcaagcccctgctcatggggacaatgcaggctgaaacccgcatttctgaccccaaagctcctgttcctttcactcacccccacaccagctctttgagtccagagctttgtccttgcctgagtcctaccctcagggacaggggcccaacccagacaccaacacatcataccctgagagggtgccaggagcccagagatgtttggagagcacagaagccctggaggctctgtggagatgctgcacatttctctattcaacagatactcaccaggtggccagcggcagagatgccacatggcatggagctcgccttggccaacaggacaggtgtggggttgggaggccttcccagggcactccttgaagcagagctgtggggaaaagttggggccaacctcagatctcctcatcaacaccggttctcctgccctcctgggccacagaaaactaagctccctggatactgcggctgggtggggccatgagggagaagaaatcacaacgagttaaaagatcattttctaaaactgttatgatcaggactcacataaacatatgacgacacatttcagagatgctctttatctcattaattaaggtgtcgtaaccagttcaaagtggaattctaagtactacacttacataattgattcaggaatgctaaaaggagttcatagatagatgcaaaactggccttttccctggaagatgaggagcaattcattgtccttccaaaggtgagaacttgaatttctaccaactcaaagagcttttgcattgctatcaattatgtacaacttagagcagtagtccccaacatttttggcaccaggaaccagttccatggaagacaatttttccacagaccaggatcgggggatggcttggggacaaagctgttctacctcagatcattaggcattaggatttcacgaggagtgtgcaacttagatctgggaatgtgcagctcgcaatagggttcgctcctatgagaatctaatgctgccactgatctgacgggaggtggagctcaggcaggaatgctcacacacccctcacctcctgctctgtggcccagttcctaacaggccatgagcagattccagtgcatgacccaggggttggggacccctggcttatagaggtgtaaaatagttcaaaggaaataaaagatgcagagctccatagaatgaaataacttggaagagtgtacaagacgatgccttgctttccatggaaggcacctactaatcttttggtccatttcagttcttcttaatgcttcctataaacatatataactgactgacacaaacagatccataatataaagaagaccactgtaaaccaatgagaaaaaaaatcaaataatccaacaaggaataggcaagagaattgaacagatgttttacagaagatatccaaatagccactaaacatatgaaaagatgttgaaccacactagtcaacagggaaatgaaaatgaaaaaccacatgagagaaagtagttctgattccaataattctggagcagctaatatcagactagccctttggcagatggcaattataaacactagaaacgctgtaagcacacacaacacccacacacaccaattgcaggcactggaacatgaccagaagtaggcaaacactagtaaggattattccgttaaatattcgtctgaagtcacactccagggcatgtaatgggtacagctagagttcaagcaggaaactgcagccctcctggtgaggagtgggatgccgggctacattttcagagcagctggaaatgaagagaagatgtccataaaggagaaggtcaccgaagggaaaccccacaatctgcaagtaaactccactgaaacctctggctgatcccttaggtgtgcatgggtagggaaaactccaaagggcccagcagaaagcaacacgtgtaaggtcaagagaactgagattccagctactgccaactgccaggcagacagactggggagtttgagtcaactcaagctaactgcttgctaacattgaaaaaaacaattaatgttctgctaaggaagaatgcaaaccccatagcctgtacacatgttaacaacatcaggtgcacatccaaaattaccaggtatgcaaagaaatatgaaaatgtgatccatagttaaaagaaaaagggatcaatggagatcaactccaagatgacctagatgcagatacagttatcagacaaggactttaaagaagttatgttaaatatgttcaaagacttaaaggaaaatatggttatcatgagtgactagatgaggtatctctataaaaaactgaaaatagttacaagaagcaaatgaaaattctagaactaagagtatgattcggaaatgaaaaacatcatttgaccaggcccagtggctcatacctgtaatcctagcactctgggaggccaaacatggaaggatcacttgatctcaggagtttgagaccaccctgggcaacatggtgaaaccccatctctattttattaaagaagaaaagaaagagaaaaacattacccaagtttaataacagattggacaagacataagaaggaactgaaaacttaaagatgcatcaatagaatatgtcaattctttttaatccaatccaaagaagagagagaaaaatactaaaaaatgaaaagagactcatcctgctggacaaggtgaagcattctaaaacatgtgaaactggagtccagagggggatgtaatacttccatgggaaaggtcaaccctaagctatatgcaaatgtacctgcgtaggctggtgtggtgggctgatggcatctccctggccaaatgtatgcccacctggaacctcagaatgtgaccttatttggaaatggggtctttacaaattaggttaaggacttgagatgatatcatactaaattttggatggatcccaagtccaaacactggtgtcctcataagaggagaggacaaagacatacatggaggtaagccatatgatgacaaaggagaagatgagcggtgtgtcaggagccacctgtgtttgtccatttgcattactgtaaagaaatacctgaggctgagtaacttatgaaggaaagaggttcaattggctcacagttctgcaggctgtataggaagtatggcaccagcatctgcttctggcgaggacctcaggaaacttacagtcatagcagaaggtgaagggagagcaggtatgccacatggcaagaatgggagcaagaggctgagggggggccccagacttaaacaactagactgtgtgtgagctgactggggcagaattcactcatcaccaaggggatgattctaaatcattcatgagggatcttcccccttgatctaatcacctcctaccaggccccacttccaacactgggaatcatattacaacatgagatttggaggggacaaatatataaaccatatccttccacccctggtcccccaaatctcatgttgcaaaatacaatcatgccttctcaacagtcccccaaagtcttacctcattccagcatcaacccaaatttcccaagtcccaagtctcatctgaagatgagtcccttccacctatcagcctatgaaatcaaacacaaattattgactcccaaaatacaatgagagtgcagacattgcgtaaacattcccattccacaagggagaagttggcaaaaagaaaggatctacatgccccatatatgtcagaaatccagcagggcagtcattaaatcttaaagctccaaggtaatctcctttgacttcatgtcccatatccagggcacattggtgcagggggtgggctcccaaggccttggaaaactctacccttgtggctttggaggatgttgcccctgtggcttctctcacatgatagagttgagtgcctgtggcttttccagattcagggtgcaaactgccagtggatccaccattctggggtctggaggacagtggcccccttcccacagctccactaggcagtgccctggtggggacattatatgggggttcaaccccacattctctttggcactgctctagtagaggttctctgtgagggctccatgctggcaggaggcttctgtctgggcacctaggctttctcatacatttctgaaatctagagggaagatgccaagcttccttcactcgtgtattctgggggcctacaggcttaacaccagatggaagtcaccaaggcttatagtggcttgcactctccaaagaagcagcctaagctatacttggggccctttgagccaaggctggagccagaggaaccaggatgtggagagcagtgtcccaaggctgcacaggcagcagtggccatggccatggcccacaaaaccatcctttccctcttggcctctgggcctgtgatgggaaagaccacctcagagatttccaaaatgccttcaaggccttcttccctttgttctggatatgagcacttagctcccttttagttatgctaatctctctagcaactggctgctccatagcctacttatatttgtctcctgaaaataccttttcttttctaccatatggccaggccatgaattttccaaattttttatgctctgcttccctttgttgatgaaaaaagccaaactctataaaacacttgacgagattgattctgagccacatgtgagagccatgaactgtggcacagcctcaaaaggtcctgagaacatgtgtgcaaggtgcttgggttgcggcctggttttatgttttagggagacatgagacatcaatcaatacatgtaaagtatacattcgtttggtttggaatggcaggacaattcaaagtggggaattccaaatcataggtggatttgaagattttctgattggcaattggctgaaaaatttaaattatctaaaaagttgaagtcagcaaaaagcaatgcttaagataaagcaggttgtggaagccaaggttcttgttatgtagatgaagcctccacgttccagagagaagagatggtcaatgtctcttatcagaacctaaaaggtgccagactcttggataaatctctcctgaatcaggaagagacctggaaagggaaaaagattctcgacagaatatacatttcctccacaagagacggctttgcagggccattccaaaatgtgtcagagaaatatattctggcataaaatactttaatttccttccatgcctgccaactgtcatgtgatgctataccagagtcaggttggaatttgatatcttattgctacaaagagtctgctttgtcagtcttaagctccctgttttaatgttaacaccggtcagctgagcctaaactccaacagggagagggtatagtgagggagtccaaaccaccctccccttcctgtcatggcctgaactggttttccaggtttctttggaatccccttgcattagcattttattttttcatttgcaccttttaaatatcagttccaactttaagtcattcctttgctcccatatcttaccatagactgttagaagcaaccaggtcacaccttagaaatgtctgcttagaagtatcttccaccagatgtcctaagtcatcactcttaaggtcaaacttccacagatccctagggcatgaatacaatgcagccaagttgtttcttaggatttaacaagcgtgacctttactccagttcccaataagttcctcatttccatctgagatttcatcagcctggctttcacagtccatatgtctatcagcattttggtgacaaccatttaatcagtctctaagaaattccaaactttccctcatcttcctgtcttcttctgagtcctccaaattcttctaacttctctgcctgttacctgattccaaagctgcttccaaattttcaggtatctttatagcaatgttccactcctcaataccaaatttctgtgttagtttgtgttactagaaaaaaaaatacatgaggctagtaatttataaagaaaagaggtttaggccaggcactgtggctcatacctgtcatcctagcattttgggaggcagaggcaggaggatcacttgagctcagaagtttgagaccaacctgggcaacatagtgagaacttgtcttgaaaagacaagaagaagggaagggtggggaagagcagaagggcagaagggcagggcagaagggaagggcagggaaggcagaagagaaggaaggaagggaggtttaattagttcatatttctgcaggccgttctggaaacacggccctggcatctgcttctggcgaggcctcagggagattgcaatcacagcagaaggcgaagggggagcaggcatgtcacatggcaagagggagcaagagaagaaagtggcacgtcccagacttttaaacaaccagctgtcacagggactaactgagggagaactcgctcatcacctgggagatggtgctaggccattcatgaggggtccagccccatgatctaatcacctcccaccaggcccacctccaacactgggaatcacatctcaacatgaaatttggagagacgcacatccaaactattgcaccacaggaagctggaagaggtggacggtcctcccctggagcactcagagacagccaccaacaccttgatctcagatttctgactcccagaactctgaaaaaatttttgttgttttaagccacatttgtgatattttgttacggcagccacagcacggatatagctggtaacagagttctttagcctccaaaatacaagcctggggtaaataactattgaatttggccacatggaaatcaggaagaatgtaataagcatcatcgatggacgggatgacctgggagatcgtggcaagtttaaagctaattggaagttggcaaccaaaaaatcctgtcttgcaaatggccaggaaattgccaagaaaacctttagaaaacatggttaaagatggagaaacccggatgactccctggtttctgaagaggtgcttaggcattgaagtgagactgatgagacttcacactgtacccttcagaagggcagacactcacgagataatcaaccacggctccctcgctgggaggcagacacagagctggaggcggcggccacaaactaggtgggcagagaggcgtcagcatcgggacttgcgggaggccctgggaaggaacaggcagcggtggggcctggacagccctggggaaaggaagttacttggaggagaccaggggcttgcatttgggccaaaaccaaggacaagagatcagctggtcccagggaactctggagcccaacaccccaccacgggtgcaggggcctgacaacccaacagagggctgtgggcaccgggcaccagcctgtggggggtctgaaggctgctgcccagccacacatgtcctggttctgaacaaagggttcaagagacacctggaaacctacccttctgagagcagcctcttagcctcagctggtattggcccctggtcaccccacatgccccgacagtggggcctggcctcagaaaggggcccctccatttgtactttctatctgatccttgacacagtgctaacaccaaagaccaaacccgaatcttggttcacatactctgcaaagaaatgactaagacaagttcttccggaggtcagttttagaacattattctgacttaattctgccttatctctgtgcaacaagaaaactatctgcacatctgtagtaaaatgtgaaggtaccttcattttgtttgtatactaaacttttaagaaatacctcactttttaaaacttggttttgtgttttgtatgcttataatattttccataatagatcattttaatgataaactctgaatcttctgacagaatgcagatcaatggattcctggccatcagggaggcgttgattgcaaaggggcctggtggaatatttggagagattctacatcttcttgcaactgttcatctggattacggtggtggttgcatgagtgtgcatttgttgaaactcacatgtcacaggatggattatactgaatgtaaactacacttgcgtaaatatgacttttaaaactttaaaaagttgggggatggttcactgccccggctcgaagccccctggccacgctgcctggccagcccacccgcatccctgccagcgcttgcctccagcgtcccaacagcctcctgaccccctgggctgctctaaaccctcaggagcgcagccatccgggatcagctggatggagatggggagcccgagactcgtgccacaccacgtcctcccacccccaccagccacacgcagacgtcaaagcagcactgtcctcgcacgcgctgctcccacccaccctggcatggccattccaggcctggggcaggaaggcagatgctccccctgcccccagacacaagcattcctgcacatacccccagcacacacacacactcccatgcgcacactgacacacacaggtgtgtgcagctgagacacagcccattcccaggcagtccagcccccgtcactgagggaaaggggcagcaccacggggccacaggagtggcagctggacacagagccaggcgctggcgaaggcccaggccactgaggcgggctgccggcatggctgggcgtgaaggccagaagagggcaggaggggccgtaggcactgtgcctattgggcctaggtgggcacacgcctggcaggagaggaacagcccagcccctgaggaaggggtgggggcaggggccatttctggaggccagggcagggccagcaccccaaggaaaagcagagcagggtgagaacggacatggggctcagagctgagcaggcctgctgggccccaggagggagacacagacgaccggggatctcaaggctggcagaggccagagatggagccccacctgggatgccatcctccttcctgggggcccaccctgcccggcccctccagcccagcacagcttggggcattggatagaaccgggagagagccgaccaggcactgaggcccctgccccaaatgcccacagcctggggaaaatgagcaggtacatgggaggggcaagtggagccccaggcacacccacacagtgcacacggcctcacctgggccggagggggcaggaggctcgccaccccgctgtggtttctctcctaatctcaccctgggtttctgccacacttgatgcaggtgatgtttctctgacattgtggactaagagttggtgctggaaggggttagccatcttggagatgttgctatggggtgcagggattttgcgtgtgagaaggacatgattatggggggagcggagggcaaactgtcatgggttaaaatgtgtcccctataaattcatgtgttgaagtcctaacccccaggaccacagaatgtgaccttgtttggaaacagtctttgcagctgcaatcaagttcagatgaggtcaccctggagtagcgcaagcctctgatccaatatgactgctgtcctcatgaaaagggggaatctgggcacagacagcacgtggggagaacgccctgtgaagatggtgctgcttccataagccaagagcagcagagacggccggcaaagcccagcagcagggagagagcctgggacagagtctcccatgacacagaggtgccagccccaccgaggcctccatcccagatgcccggcctccagaaccaggacggaataaacgtctgttgtttaagccacgcagtctggggtgctgtgttgccagggccacagttaacggatacgagtgttgtcctgagctgccagccccacaggctgcacgaggcctccctgccccagcccagtgcagactccccagccccctgggtgtgccatgggcagtgcggggacccctcactccgtcctcccccagcctgggaggttgagcccattatgagctccatggggtgaagctggaacgagaggctgggagccgactgggagcctgcggctggaggatggatttccccagggacccacacgtgcacctccacctgtctcctggacattctctctgagggcagggctggtgccagctcagggatccagcagggtcacaagggcaggccgggtccttgtggagagcacatttagtgggagggacatgatttcccttcaaagtgcccattctggacgcttcccgttccatgctggacgcttcctcttccacgctggatgcttcctgttccacactggatgcttcctgttccacgctggatgtttcctgttacactctggatgcttcctgttccacactggatgcttcctgttccatcctggatgcttcctgttccatgctggacatttcctgttccactctggatgctccctgttccatgctggatgcttcctgttccatgctggatgcttcctgttccatgctggacatttcctgttccactctgcatgcttcctgttccactctggatgcttcctgttccatggtggacgtttcctgttccactctgcatgcttcctgttccatgctggatgcttccttttccattctggatgcttcctgttccatgttggatgtttcttgttccactctggatgcttcctattccattctggatgcttcctgttccatgctggacatttcctgttccatgctggatgctttctgttacatcctggatgcttcctgttccatgctggatgttttttgtttgactctggatgcttccagttccattctggatgcttcctgttccatgctggatgcttccttttccattccgcacaattcctattccattctggacacttcctgtgcgacacctccttgggttttctgtctgcccagtccctctatcctcatcccgttccctgctacctcccacctccacaatcgtccttgcccagctcctccctctctctagagcttcggcctggcaaggtccctcctgatctcagtccaggctcccccagcacaggtaggagcctagcacctgcccttggacctccccaccctgcatggtgccagcatcccccggtccccagggaggccccatttctctctctgcttgtagtccagtggccctggagtcccactgcaactcgggtgtgcccctgacctctgaggaagttaagtgtcctgtccctagccaggctatcccgtctgctcagccccagggccctgcccccaaccccttcccctcacctgcaccacaggctctggccaactctgcccaggccctgaatgggcccctctggctcccctctgctgctacactgccctgcaccacctccactcagcttcagtgtgttcatccacctgtcccaagtcccctcggcccccaggagcacagctggtggccctggctcctggcagcccatcttgttccttctggagcaccagcctcagaggccttcctgtgcagggtccacttggccagccctgggaccctcctggtctcaagcacacacgttctccctgcagccagacctgcccctgcctgtgagctcagccctgagccttggaatgccttcccatctccatcccagctcgcctttgccagctgctcagcaggatgaactcacactcccctccctgcaccatgagtcagagccagctggagacacgcccaggccaaagcagccaccagggcctagtgggggccagaagcttcagatgagaggcccaggtattgagaggctgagatcacgggcagaatggtcataatcgctgccagtatcagtccagccccagggactcagagacagagaaaagagcagcacacaaggtctgggctccccaccttctcccgtgagtacgggggagtatgggggcagccaccacccccatccccacacacccatgaggcagcctcggctgtgtctggactccccctcgccctctgacccagaaaccaccagaagaaaagggaacttcaggaagtaagtggtgccgccggtttcaatcctgttcttagtctttgcagcgtggagttcacacacctggggacctgggggccgagctgtgatttcctaggaagacaaatagcggctgacggcaggggcggggctgcccacatgtacctcgccagaacaggaagggctgagacccccacctcggtgagtggggtcagcacagggcaggggcacaggctcgggaggaggacagagcctgggggcagccgtgggcgctcctggacctgagatgctgaacaggctccaagaggctggggagacatggggtcgaggccggccccacatggaggcccaagcggagccagcacgggggaggtgggcagccttcaggcaccgatgcccacccagtgcgagacgacggggaccgtgggcaggggcttccaagccaacagggcaggacacaccagaggctgactgaggcctccaggacgaccgggctgggagcacgaggaacatgactggatgcggcagagccggccgtggggtgatgccaggatgggcacgaccgacctgagctcaggaggcagcagagcgagggaggaggagaggccccaggtgaacggaggggcttgtccaggccggcagcatcaccggagcccagggcagggtcagcagtgctggccgtggggccctcctctcagccaggaccaaggacagcaggtgagccgggagcagagcagggagggtgagtgtggcagcaggacaggagggtggaagccaaggagcccagaggcagaggcagggacaggggaggcacaggggctgggctcagagccagctgatggggttggggcacctgctggcggggagcagggctgtggtcagcagtggagaggaggggagagctgtgctgagtgcacgggcgggagaagggaagagtccagggaggcccagaaaggcccagagtgcagcaggcctggggcgaggggaagggctgaggctccgtgcgttcagggaactgacccagcagagcagaggccactgaggagctgaggttccagagaggcttccagagcaggagcagtgcagggacaggaggatccgggagctcattcaggaggggcacatgggcaagggcaaggggctctgttggggagacctgactggacactggggctgctccacagcatagggaacacgccaagtgctgcaaaatcaaaaatgagggcagaaaaacagcccaaacctggacagagggtgccaggacaggcaggggggcaacagtgacctgagtgacattgctgcccgggttgagggagggcagagtgagcagggagcaggcattggagctcagggaccaggaccaagcagccacaggtgagcagggcaggtgggggcagaaggagcagggggcacctcctggagctcaggggaccagggcagagcagcctcaggtgagcaggggctggtgggcggcaggatgagcagggggaagaccctggagctcaggggaccagggcagagcatcagaaggtgagcatggctagtgggagatgggcaagcagggggcagcccctggagctcaggggaccaggacagagcatcaggaggtgagcatggctagtgggaggtgggcgagcagggggcagcccctggaactcaggggaccagggcagagcagccgcaggtgagcacgggctggtgggaggcgggaggaacagggggcagctcctggacttcaggggaccagggagggcatctgaaggtgaacaggggccagtggggggcaggatgagcagggggaagctcctggagctcagggagccaaggcagagcagccgcaggtcagcaggggcaggtgggaagcatggggagcaggtgggcagcccctggagctcagagagccagggcagatcatccacaggagagcaggggctggtaggaagcaggaggagcaagtgggcagcttttggagctcagagcaccagggcagaagagcctcaggtgagaaggggcaggtgggaggcagaataagcaggggacagcccctggacctcaggagaccagggcagagcatcacaacgtcagcatggctggtgggaggtgggcgagcagggggcagcccctggacctcagagagccagggcagatctgcaggtgagcaggggcaggtgggaggcaggaagagcaggaggcagctcctggagctcaggggatcagggcagagcagccacaggtgagcaggggcaggtaggaagcagaaagatcaggggtcagcccctggagctcaggggacaaggggagagcatcagaaggtgagcaggactgaggctcagcctcagggagccagggcagagcagctgcaggtgagcagggccggtgggaagcaggaggagcaggtgggcagcccctggagctcagagagccagggaagatcatccgcaggtgagcaggggctggtgggaagcaggaggagcaaggggcagctcctggagctcaggggaccagggcagagcagtcgcaggtgaacaggggcaggtggggggcaggaggagcaaggagcagctcctggagctcaggggaccagggcagagcagtcgcaggtgaacaggggcaggaggagcaaggggcagctcctggagctcaggggaccagggcagagcagccgcaggtgagcaggtgcaggtggggggcaggaggagcagggggcagctcctggagctcaggggaccagggcagagcagccgcaggtgagcaggggcaggtggggtgcaggaggagcagggggcaggcactggagctcaggggaccagggcagagcagtcgcaggtgaacaggggcaggtggggggcaggagtagcaaggggcagctcctggagctcaggggaccagggcagagcagtcgcaggtgaacaggggcaggtggggggcaggaggagcagggggcagctcctggagctcaggggaccagggcagagcagccgcaggtgagcaggtgcaggtggggggcaggaggagcaggggtcaggcactggagctcaggggaccagggcagagcagccgcaggtgagcaggggcaggtggggggcaggaggagcagggggcaggcactggagctcaggggaccagggcagagcagccgcaggtgagcaggggcaggtggggggcaggaggagcagggggcaggcactggagctcaggggaccagggcagagcagccgcaggtgagcaggggcaggtggggggcaggaggagcagggggcaggcactggagctcaggggaccagggcagagcagccgcaggtcagcagggccggtgggaggcaggacgagcaggggacaggcactagagctcagggcaaggcagccacaggtgagcagggctggtgggaggcatcactcagctcctagactttggcaggagctgggtagttgctggcaacagacagctgagggctggtgaaagtgcagtgcagcctcctggtgccgggaagggagtgtgagtccatcccactgagcagttggcaagggcgagctgggatggagaagggaaggcgttccagggctcagggctgagctctcaggcaggggcaggtgtggctgcagggggaacgtgtgcttgagaccaggagggtcccacggctggtcccagcggaccctgggcaggaaggcctctgaggctggcgccccagaaggagcaagatgggctgccaggagccagggccaccagcacaatgaagctgagtggaggtggtgcagggcagtgtagcagcagagggcagccagaggggcccattcagggcctgggcagagtcagccagagcctgtggtgcaggtgaggggaaggggtggtgagcggggccctggggctgagcagaggggatggcctggctgagggcagggcgcttagcctcctcagaggtcaggggcacaccccacctgcagtgggactccagggccactgggccagcggcagagagaaatggggcctccctgtggcctgggggtcctggcaccatgcagggtggggagggccaagggcaggtgcaaggctcctacctgtgctggggggcctgggttgagcccagcagggaccttgccgggggaagctctggagagagggaggaggtgggctggtggccgagaaggccaggccagggctgggagggtgacggtgtggtgactgagcctccagaagtaatgcaggacactgggaggcagggggcatccaggcactcagggccctgacctgggctgctgcacactggggctaaggggaaaggaggggagaggctgaggaggaggctccaggaggctattccaaggcagggggttccggggccctggggctgaagggcgccgaccctatgcagtgtctggcccctctgctgcacagaagaaaagggccttggagggcagagggcaggctatgaccagggccctgggcaagtcaggccaactcactaggggagggccacgctggggcggcagggtcaggggcttcagggggctcgggggacccacgagaagccatctgagaacagtgtccactggtcaagccaggcacccataaaaggctggagtggggccaatgggcatgagccgtccctgaggtggcaccgatggccagagctgaggccaagctagaggccctggactgtgctgactcccggcagacacagagcgctgacctggctgccgagccccgcctcctaggctgcaggggtgcctgcagaagggcaccacagggccaccggtcctgcaagctttctggggcaggccgggcctgaccttggctttggggcagggggtgggctaaggtgacgcaggtggcgccagccaggcgcacacccaatgcccgtgagcccagacactggacgctgaacctcgcggacagttaagaacccaggggcctctgcgccctgggcccagctctgtcccacaccgcggtcacatggcaccacctctcttgcagcctccaccaagggcccatcggtcttccccctggcaccctcctccaagagcacctctgggggcacagcagccctgggctgcctggtcaaggactacttccccgaaccggtgacggtgtcgtggaactcaggcgccctgaccagcggcgtgcacaccttcccggctgtcctacagtcctcaggactctactccctcagcagcgtggtgaccgtgccctccagcagcttgggcacccagacctacatctgcaacgtgaatcacaagcccagcaacaccaaggtggacaagaaagttggtgagaggccagcacagggagggagggtgtctgctggaagccaggctcagcgctcctgcctggacgcatcccggctatgcagccccagtccagggcagcaaggcaggccccgtctgcctcttcacccggaggcctctgcccgccccactcatgctcagggagagggtcttctggctttttccccaggctctgggcaggcacaggctaggtgcccctaacccaggccctgcacacaaaggggcaggtgctgggctcagacctgccaagagccatatccgggaggaccctgcccctgacctaagcccaccccaaaggccaaactctccactccctcagctcggacaccttctctcctcccagattccagtaactcccaatcttctctctgcagagcccaaatcttgtgacaaaactcacacatgcccaccgtgcccaggtaagccagcccaggcctcgccctccagctcaaggcgggacaggtgccctagagtagcctgcatccagggacaggccccagccgggtgctgacacgtccacctccatctcttcctcagcacctgaactcctggggggaccgtcagtcttcctcttccccccaaaacccaaggacaccctcatgatctcccggacccctgaggtcacatgcgtggtggtggacgtgagccacgaagaccctgaggtcaagttcaactggtacgtggacggcgtggaggtgcataatgccaagacaaagccgcgggaggagcagtacaacagcacgtaccgtgtggtcagcgtcctcaccgtcctgcaccaggactggctgaatggcaaggagtacaagtgcaaggtctccaacaaagccctcccagcccccatcgagaaaaccatctccaaagccaaaggtgggacccgtggggtgcgagggccacatggacagaggccggctcggcccaccctctgccctgagagtgaccgctgtaccaacctctgtccctacagggcagccccgagaaccacaggtgtacaccctgcccccatcccgggatgagctgaccaagaaccaggtcagcctgacctgcctggtcaaaggcttctatcccagcgacatcgccgtggagtgggagagcaatgggcagccggagaacaactacaagaccacgcctcccgtgctggactccgacggctccttcttcctctacagcaagctcaccgtggacaagagcaggtggcagcaggggaacgtcttctcatgctccgtgatgcatgaggctctgcacaaccactacacacagaagagcctctccctgtctccgggtaaatgagtgccacggccggcaagcccccgctccccaggctctcggggtcgcgcgaggatgcttggcacgtaccccgtgtacatacttcccaggcacccagcatggaaataaagcacccagcgcttccctgggcccctgcgagactgtgatggttctttccacgggtcaggccgagtctgaggcctgagtggcatgagggaggcagagtgggtcccactgtccccacactggcccaggctgtgcaggtgtgcctgggccgcctagggtggggctcagccaggggctgccctcggcagggtgggggatttgccagcgtggccctccctccagcagcagctgccctgggctgggccacgagaagccctaggagcccctggggacagacacacagcccctgcctctgtaggagactgtcctgttctgtgagcgccctgtcctccgacccgcatgcccactcgggggcatgcctagtccatgtgcgtagggacaggccctccctcacccatctacccccacggcactaacccctggcagccctgcccagcctcgcacccgcatggggacacaaccgactccggggacatgcactctcgggccctgtggagagactggtccagatgcccacacacacactcagcccagacccgttcaacaaaccccgcactgaggttggccggccacacggccaccacacacacacgtgcacgcctcacacacggagcctcacccgggcgaaccgcacagcacccagaccagagcaaggtcctcgcacacgtgaacactcctcggacacaggcccccacgagccccacgcggcacctcaaggcccacgagccgctcggcagcttctccacatgctgacctgctcagacaaacccagccctcctctcacaaggtgcccctgcagccgccacacacacacaggggatcacacaccacgtcacgtccctggccctggcccacttcccagtgccgcccttccctgcagctggggtcacatgaggtgtgggcttcaccatcctcctgccctctgggcctcagggagggacacgggagacggggagcgggtcctgctgagggccaggtcgctatctagggccgggtgtctggctgagccccggggccaaagctggtgcccagggcgggcagctgtggggagctgacctcaggacattgttggcccatcccggccgggccctacatcctgggtcctgccacagagggaatcacccccagaggcccaagcccagggggacacagcactgaccacccccttcctgtccagagctgcaactggaggagagctgtgcggaggcgcaggacggggagctggacgggctgtggacgaccatcaccatcttcatcacactcttcctgttaagcgtgtgctacagtgccaccgtcaccttcttcaaggtcggccgcacgttgtccccagctgtccttgacattgtcccccatgctgtcacaaactgtctctgacactgtcccacaggctgtccccacctgtccctgacgctgtcccccatgctctcacaaactgtccctgacattgtccccaatgctgcccccacctgtccaacagtgtcccccaggctctccccacatgtccccgacactgtcccccatgctgtccccatctgtccccaacactgtcccccaccctgtccccctttgtccccaacactgtcccccacagtttccacctgtccctgacactgtcccccatgctttccccacctgtccctgacaccatcccccactctgtcccctatagttcctggccctgtcccccacgctgtcccctacagtacctggcactgtcccccatgctgtcccctcctgtatgaaaccctgtcccacatgctgtccccacctgtccgtgacaatatcccccacactgtccccacctgtccccgacactctcctccacgttgttcttacctaaacccgacactttcctccatgctgtccccacccatctccgacactgtaccccacgttgtccccacctgtcctcaacactgtcccccatgctgtccccacctgtccccaacactctcctccatgctgtccccacctgtccctgatattgtcccccatgcagtctccacctgtccccaatgctgtcccccaggctgtacctaccagtacaacactgtcccccatgctgtccccacctgtccctgacactgtcccccacgctgtcccctcctgtccccgacactgtcccccacactgtccccacctgtccccaacactatcctccatgctgtcccctcctgtccccacctgtcccctacactgtcccccatgctgtccccaccagtccccaaaactttcctccacactgtccccacctgtccccaacactgtcccccacgctatcccccctgtccccgacaatgtccccactgtttcctcctgttccctcctatccctgacactgtccgccatgctgtccccacctgtccctgacactgtctcccactctgtcccctataatccctgacactgtcccccacgccgtcccctcccgtatgcaccactgtcccccaagctgtccccacctgtcctcaacacagtcccccatgctgtccccacctgtccccaacactctcctccatgtccccacctgtccctgatattgtcccccatgcagtccccacctgtccccgatgctgtcccccgggctgtacctaccagtccaacactgtcccccacactctccccacctgtccctgatactgtcccccatgctgtccccacctgtcccggacactgttctccacgctctcccctcctgtccctgacactgtcccccacactgtccccacctgtccccaacactatcctccatcctgtcccaacctgtctcctacactgtcccccatgctgtccccaccagtccccaacactgtcctccatgctgtcccccatgtccccaacactgtcccccatgctatctcccctgtccctgacaatgtccccactgtttcctgtcccctcctatccctgacactgtcccccatgctgtccccacctgtcccccacatggtctccaccggtccctgacactgtctcccactctgtcccctataatccctgacactgtcccccacaccgtcccctcctgtatgcaccactgtcccccatgctgtccccacctgtccctgatgctgtcctccacacagtccccacctctccctgacactgtccccatctctccccaacactctcctccatgctgtccttaactgtccccaacactcttccacactctgtctccacctgtccctgacactgtcccccacactgtcctcacctgtgtctgacactgtcccccacgctgtccccacctgtccctgacgctgtcttctgtgctgtccacatgctgttggtgccctggctctgctctctatcaccaagcctcagagcaggcagtggtgaggccatggcacctgggtggcatgaggggccggatgggcctcaggggcagggctgtggcctgcgtggactgacgggtgggtgggccttgggggcagagaggtggcctcagtgccctgaggggtgggtggggctcgggggcagggctgtggcctcgctcacccctgtgctgtgccttgcctacaggtgaagtggatcttctcctcggtggtggacctgaagcagaccatcatccccgactacaggaacatgatcggacagggggcctagggccaccctctgcggggtgtccagggccgcccagaccccacacaccagccatgggccatgctcagccaccacccaggccacacctgcccccgacctcaccgccctcaaccccatgactctctggcctcgcagttgccctctgaccctgacacacctgacacgccccccttccagaccctgtgcatagcaggtctaccccagacctccgctgcttggtgcatgcagggcactgggggccaggtgtcccctcagcaggacgtccttgccctccggaccacaaggtgctcacacaaaaggaggcagtgaccggtatcccaggcccccacccaggcaggacctcgccctggagccaaccccgtccacgccagcctcctgaacacaggcgtggtttccagatggtgagtgggagcgtcagccgccaaggtagggaagccacagcaccatcaggccctgttggggaggcttccgagagctgcgaaggctcactcagacggccttcctcccagcccgcagccagccagcctccattccgggcactcccgtgaactcctgacatgaggaatgaggttgttctgatttcaagcaaagaacgctgctctctggctcctgggaacagtctcagtgccagcaccaccccttggctgcctgcccacactgctggattctcgggtggaactggacccgcagggacagccagccccagagtccgcactggggagagaaggggccaggcccaggacactgccacctcccacccactccagtccaccgagatcactcagagaagagcctgggccatgtggccgctgcaggagccccacagtgcaagggtgaggatagcccaaggaagggctgggcatctgcccagacaggcctcccagagaaggctggtgaccaggtcccaggcgggcaagactcagccttggtggggcctgaggacagaggaggcccaggagcatcggggagagaggtggagggacaccgggagagccaggagcgtggacacagccagaactcatcacagaggctggcgtccagccccgggtcacgtgcagcaggaacaagcagccactctgggggcaccaggtggagaggcaagacgacaaagagggtgcccgtgttcttgcgaaagcagggctgctggccacgagtgctggacagaggcccccacgctctgctgcccccatcacgccgttccgtgactgtcacgcagaatctgcagacaggaagggagactcgagcgggagtgcggccagcgcctgcctcggccgtcagggaggactcctgggctcactcgaaggaggtgccaccatttcagctttggtagcttttcttcttcttttaaattttctaaagctcattaattgtctttgatgtttcttttgtgatgacaataaaatatcctttttaagtcttgtacttcgtgatgggagccgccttcctgtgtccacgcgcctcctgcccccggtggaaaacacggtcaggaggaggctggtccagctgcacctcgggggctccctgcatacgccccccgcctcctgcagccacacgcattgcccgagcgaccctccctggcccctgtcactacatggacccccggggcttctcctcttttctacatggatgcagtttctcctcctgctgggcacggtgctgcctgccctggtcactctgcgggggacagggcctccagggaaagctgggtcgaggctgggagctggctcaggctggccaggcagagccacagggagggccttccagaaccaaccatggtccgaagcgagaggtgggtgtcagatctgtgtgcgtcagctcaggaccacagcggggcagctcccacggcagacatggatcctcccaggcctagagaccaggaatctgagatcaggatgcaggcagggctggtttctctcaagccctctctccttggcttgtagacaccgtctcctccctggtcctcacatggccatacctctgtgtgcccgtgtcctaagcttctcttcttagaacacacatcggattagattagtgaccccctatgaacttaatgacctctgtaaagaccccatctccaaatagtcacattgtgaggccagggattaagacttgaatatatgaatttgtaggggccacgatttaacccatcacagtccagactctggcccccaaaattcatgttcttctcacatgcaaaacacattcatcctgtctcagcatccccctgggcactaggtcatgtagcaaggacggattctcaacagaaataactattgcaacggaagaaagagtccggcatgacctggactcaccttcatctgtgcagaggccacagccttgtaaagggaggtggtagggggagcagggtgggtgctcggggctcagtcgttggggaagggaaaagtttcccagcgctggtcagcgtccccgggatgggacccgctgtgtccgtgccggccactgttgaggtcaggattctgtcctcccagagcctggagacacaggccccatccttcacaaaggggacacttcagggagtggctctcaggtcccgagaaagaccctcctgggtcacaggaaatgcacagacatcaggaacggatagaaggtcgtgtggttgcggccctctcagcagataccctgagaaagggaggtcggggttggtccaaacggtgagttctggtgcacggagctttctcaggcaggtgttgacggggcaggggtcggcctaggggtacggccagaagctgttagaaactgttagtgtctgctcaagtctttacaagccaaggttgaggccgagtggagaggctccgaggagcctggctggaactcagtcaaggacagggtcttgttactgcagtggctgcggtggctgcggtggctgcgaaatgccgtcggagttgcctgtggcaggagagagaccatctcacccaggaaggaggagtggttggattcgtttgtgtggcatcgagcagctggagcttcaccaaacacagagttggggatgaaatccccagagcccggaccctgccatgccgtgggaaggctcgctgctggagggtgggctccagggggcctggcctgaactgggtgctgaagcccagccctttaactctcaggacacgctgctgcagccccgcggggggtgagggagacagcacctggggtgcagggcgggcagctgctgcatcaccggctctatcccaagcccaaggatggcgtcccagagatgcaggagagctttgtccagagaaggtgccagccctcagggaccctgctggacagctctccaccctctgcccttcaaggggccctacgggcctccgggtgccctggtggggtgggctccagtccactgtctgaggatggacggcctggccaggataaggaaaggagacccaggacggtgccgggctccgggtcattccgtgcactgagcaggctgagttgggaagaagcagatgcttcctgcagctcctgcccctgcagggcctggcgcctggaccaggttcccctggggaaattgggcccctccctgagccacccggggcccacctcccactttctacctgggaccgagcatcctccagagggtcagccctcctgcgggaacaccatgcccagccccaggaccctccctcaactctccagcaaggctgcccctgcacgcccccagcagcccatgctgtgatgtagcatgacatcatgtgatgtggtgtgatgtcctatgacagggtgacatccctggtgtgatgtggtgtgatgtggcgtgatgtcctttgtgtgatgtggtgttggactacatggttggacatagtgtgatgtggtgtgaccgagtgtgacatccctggtgagatgtggtgtgacatggtgtgaggtgttgtgacatggtgtaatgtccctggtgtgaggtggtatgacatggtgtgaggtgttgtgacatggtataatgtccctggtgtgaggtggtgttggacatgatgtgatgtggtgtgacagagtgtgatgggtatgacatccctggtatgatgcggtatgagattatgtggtatggtgtgacatgatgtgatgtggcgtaacatccttggggtaatggggtatgatgtcgtttgacgggtgtggtggtgtggggtgtgatgaggtgtggtgtgacatgatgtgacctgtgacgtgctgtgtcagggtgccacatccttgctgtgatgtgatgcggtgtgacacggtgtgatgtggcatgatggggtgtgacccggtacgacatccccagtgtgatgagttaatggtgtgatgtgtgacatccctagtgtgacatagtgtgatgtggtgtgatgaagagggcctcgccctccacagctgtgggtatttctcatcaggtggaaacacgagactgagaaaagaaataagacacagagacaaagtgcagagaaagaacagtgagcccaggggaccggcacactcagcacgcgaggacctgcaccggcaccggtctctgggttccctcagtatttattgatgactattttcactatctccatacggggagtgcggcaggagaacagcgtgaacagggtgatgatggggagaaggtcagcaggaaaacatgtgagtaaaggaatctgcatcataaataactcccagggaaggtaccgtgctgggatgtacacatagactagatttatgtttctctttacccaaacatctcagtgtagtgaagagtaacagagccgtatcaccgctagcatatcttgtctccagccttagggcggttttctcctacctcagaatagaatgaatggtgggtgtaaagcccagacattccattcccagggacgtgcaggaaacagaggccttcttcttatctcaaccgtaaagaggccttcctcttttaccaatcctcctcagcacagaccctttacaggtgtcaggctgggggacagtcaggtctttcccttgccatgaggccatatctcaggctgtctcagtgaggagaaactgggacaatacctaggctttctccggcagaggtcccttcagctttccgcagcgtattctgtgcctagttaacagagaatggagaatggcgatgacttctaccaagcacactgcctgcaaacgtatcgtgaaccaggcacgtcctgcgcagccctaaaccccttaaaccttgattccatgcagcacaggtttctgtgagcacagtgttggggctaaagttacaggttaacagcgtctcaaagcagaacaatttttctttgtacagatcaaaatggagtttcttatgtgttccttttctacataggcacagtaacagtctgatctttcttttccccagtgtgacatggtgtgacgttcctggtgtgattcttgtgttgtgacatttgtggtcaccccaggatacagaggtctctgtggccaagggaagggggagaatggaaccatctgagcatgttgacctggaggaattggtggcccttgagtccacgaagcccacccttccaggtgcccctgccccacgtgacccaagtgggcttgcagagcagcaagcaggactctggttagacaggaggaaggacctgccaccacgtggccttgtgaggagacagagcgaggctgtgacctcggcgtccgaggcaggctgaagagacgggcagagggaggatgctggggaggcaggggtgaggggagtgagagcccaggtttcagctgagcccctccacagggaaggagcctagctgaacacccatctccccacacactcccaaccctgcctctgcccgaccacctcccagaaggcacctcgacccctctgctacccacactcagcaaggggtatggtgtccccaccgagtccagccagtgaggcccggcacagccacgcctgtgcccaccactcccatggccaagctcgctgctaacatggcaggacagggccaggcctggaggagacagaacatcagtcccatggggaagctccctgctcacacggcagggccgggcctggagaagacagaacaccccatccggcatggtactcaggctgcacatgcctgccacgaacgggggccacgcgacaatgctgccacgcacgggggacacacgacaatgcctgccatgcatagtggccacacaacaatgcctgccacgcgtgggggacacgcgacgatgcctgccatgcatggggacacgtgacacacacatacacacacgggcctcacaggcacacgaatgtttgcaaccccagcacccacccagcacactcaggcacaggctccctgggcgggtcacaacctcacaccttgagctactccatgtgccaggctcttcacccacgttcccgtccccggtgctagctattgagccacactgtcttctctgtggatccctcccagcccactcagcacaatggacatgctctctaccatccagtgactgcaccggcctcttcccctcagcacccacgtctggccatctcccaggaaacccggaccaccacgggcagggaccaccttcctcactgtccacatggaccaccccacacctgacctcagatgcagtcacactacgtcctgcttcaatattgaaagggggaaaagctggaggagggtaaagatgaaagagaaaaaagcaagaggggagggtcacattcttctgaggctttgattacatctcactgagccccccacgttgcatgaaaaggaggggtggagggagcaattacgcattcgccttgtgctcactaaatctacactttataagcaaataaacagagtagaggaagaagtcaaatatgcattcgtctcaggggtaggagggacgatttcttgtctcattttgtcccatgtcatgaagaccagctgttaatttatattctcagggtgagggaggccacctgggtagacctggcctatctgctgctgctatcagtttggaaacaaaaggaaacgcatgactttttttttttttcatgactcagcttcccacctcaacggttcattttggcatagtgagtttggagtcctgagattttattttcctttcacaatggtcaagatcgcaccctcagtattcaggagagctggtccaacccagacccctgctgtccctggacacttgaaatacgtgctgcagtctctgacactctctcaccatggtagaaactgaggtcttggcgagtctgcagcccctgctcatggggacaatgcaggctgaaacccgcatttctgacctcaaagctcctgttcttttcactcacccccacaccacctctttgagtccagagctttgtccttgcctgagtcctaccctcagggacaggggcccaacccagacaccaacacatcataccctgagagggtgccaggagcccagagatgtttggagagcacagaagccctggaggctctgtggagatgctgcacatttctctattcaacagatactcaccaggtggccagcggcagagatgccacatggcatggagctcgccttggccaacaggacaggtgtggggttgggaggccttcccacggcactccttgaagcagagctgtggggaaaagttggggccaacctcagatctccccatcaacaccggttctcctgccctcccgggccacagaaaactaagctccctggatactgcggctgggtggggccatgagggagaagaaatcacgagttaagagatcattttttaaaagtattatgatcaggactcacataaacatatgacgacacatttcagagatgctctttatctcattaattaaggtgttgcaaccagttcaaagtggaattctaagtactacacttacataattgattcaggaatactaaaaggagttcatagatagatgcaaaactggccttttccctggcagaggaggagcaattcattgtcctttcaaagatgagaacttggatttctaccaactcaaagagtttttgcattgctatcaattatgtacaacttagagccgtggtccccaacatttttggcaccaggaaccagttccatggaagacaatgtttccacagaccaggatcgggggatggtttggggacaaagctgttccacctcagatcattaggcattagggtgtcataaggagcatgcaacttagatcccgggaatgtgcagctcgcaatagggttcgctcctatgagaatctaatgctgccactgacctgacgggaggtggagctccggcaggaatgctcacacacccctcacctcctgctctgtgtcccagttcctaacaggccatgaactggttccagtgcatgacccaggggttggggacccctggcttatagaggtgtaaaatagttcaaaggaaataaaagatgcagagctccatagaataaaataacttggaagagtctacaagacgatgccttgctttccatggaaggcaccaagtaatcatttggtccatttcagtttttctcaatgtttcctataaacatatataactgactgacacaaacagatccataatataaagaagacccctgtaaaccaatgagaaaaaaaaatcaaataatctaatgaggaataggcaagagaattgaacagatgttttacagaagatatccaaatagccactaaacatatgaaaacatgttgaaccacactagtcaacagggaaatgaaaatgaaaaaccacgtgagagaaagtagttctgattccaataatgctggagcagctaatatcagaccagccctttggcagaaggcaattataaacactggaaatgctgtaagcacacacaacacccacacacaccaattgcaggcactgggacatgaccagaagtaggcaaacactagtaaggattattccgtgaaatattcgtctgaagtcacaccccagtgcaggtaatgggtgcagctagagtttaagcaggaaactgcagccctcctggtgaggagtgggatgcagggctgcattttcagagcagctggaaatgaagagaagatatccgtaaaggagaaggtcaccgaagggaaaccccacaatctgcaagtaaactccagtgaaacctctggccgattccttaggtgtgcatgggtagggaaaactccaaagggtccagcagaaagcaacacctgtaaggtcaagagaactgagattccagctactgccaactgccaggcaggcagacttgggagtttgagtcaactcaagctaactgcttgctaacattgaaaaaaacaattaatgctctgctaagaaagaatgcaaaccccatagcctgtaccacatgttatcaacaacatcaggcacacatccaaaattactatgtatgcaaagaaacatgaaaatgtgatccaaagtcaaaagaaaaagggatcaatggagatcaactccaagatgacctagatgcagatacagttatcagacaaggactttaaagaagttatgttaaatatgttcaaagacttaaaggaaaatatggttatcatgagtgactagatgaggtatctctataaaaaactgaaaatagttacaagaagcgaatgaaaattctagaactaaaagtatgattcggaaatgaaaaacatcatttgaccaggcccagtggctcatacctgtaatcctagcactttggaaggccaacaaggaaggatcacttgacctcaggagttggagaccagcctgggcaacatggtgaaaccccatctctattttattaaaaaagaaaagaaagagaaaaacattacccaagtttaataacagattggacaagacataagaaggaacagaaaacttaaagatgcatcaatagagtatatcaattctttttaatccaatccaaagaagaaagagaaaaatactaaaaaatgaaaagagattcatcctgctggagaaggcgaagcattctaaaacatgcaaaactggagtccagagggggatgtaatacttccatgagaaacgtcaaccctaagctatatgcaaatgtacctgcgtaggctggtgtggtgggctgatggcatctccctggccaaatgtatgcccacctggaacctcagaatgtgaccttatttggaaatggggtctttacaaattaggttaaggacttgagatgatatcatactaaattttggatggatcccaagtccaaacactggtgtcctcataagaggagaggacacagacacacatggaggtaagccatatgatgacaaaggagaagatgaggggtgtgtcaggagccacctgtgtttgtccatttgcattactgtaaagaaatacctgaggctgagtaacttatgaaggaaagaggttcaattggctcacagttctgcaggctgtataggaagtatggcaccagcatctgcttctggcgaggacctcaggaaacttacagtcatagcagaaggtgaagggagagcaggtatgccacatggcaagaatgggagcaagaggctgagggggggccccagacttaaacaactagactgtgtgtgagctgactgggggagaattcactcatcaccaaggggatgattctaaatcattcatgagggatcttcccccttgatctaatcacctcctaccaggccccacttccaacactgggaatcatattacaacatgagatttggaggggagaaatatataaaccatatccttccacccctggtcccccaaatctcatgttgcaaaatacaatcatgccttctcaacagtcccccaaagtcttacctcattccagaatcaacccaaatttcccaagtcccaagtctcatctgaagatgactcccttccacctatcagcctatgaaatcaaagacaaattattgactcccaaaatacaatgagagtgcagacattgggtaaacattcccattccacaagggagaagttggcaaaaagaaaggatctacatgccccatatatgtcagaaatccagcagggcagtcattaaatcttaaagctccaaggtaatctcctttgacttcatgtcccatatccagggcacattggtgcagggggtgggctcccaaggccttggaaaactctacccttgtggctttggaggatgttgcccctgtggcttctctcacatgatagagttgagtgcctgtggcttttccagattcagggtgcaaactgccagtggatccaccattctggggtctggaggacagtggcccccttcccacagctccactaggcagtgccctggtggggacattatatgggggttcaaccccacattctctttggcactgctctagtagaggttctctgtgagggctccatgctggcaggaggcttctgtctgggcacctaggctttctcatacatttctgaaatctagagggaagatgccaagcttccttcactcctgtattctgggggcctacaggcttaacaccagatggaagtcaccaaggcttatagtggcttgcactctccaaagaagcagcctaagctatacttggggccctttgagccaaggctggagccagaggaaccaggatgtggagagcagtgtcccaaggctgcacaggcagcagtggccatggccatggcccacaaaaccatcctttccctcttggcctctgggcctgtgatgggaaagaccacctcagagatttccaaaatgccttcaaggccttcttccctttgttctggatatgagcacttagctctcttttagttatgctaatctctctagcaactggctgctccatagcctacttatatttgtctcctgaaaataccttttcttttctaccatatggccaggctgtgaattttccacatttttaatgctctgcttccctttgttgatgaaaaaagccaaactccataaaacacttgaaaaattgattctgagccaaatatgagagccatgaactgtggcacagcctcaaaaggtcctgagaacatgtgtgcaaggtgcttgggttgcggcctggttttatgttttagggagacatgagacatcaatcaatacatgtaaagtatacattggtttggtttggtttggaaaagcaggacaattcaaagtggggaattccaaatcataggtggatttgaagattttctgattggcgattggctgaaaaagttaaattatctaaaaagttgaagtcagcgaaaagcaatgcttaagataagggggttgtggaagccaaggttcttgttatgtagacgaagcctccacgttccagagagaagagatggtcaatgtctcttatcagaacctaaaaggtgccagactcttggataaatctctcctgaatcaggaagagacctggaaagggaaaaagattctcaacagaatatacatttcctccacaagagacggctttgcagggcccttccaaaatgtgtcagagaaacatattctgggataaaatactttaatttccttccatgcctgccacctgtcatgtgatgctataccagagtcaggttgggatttgataccttattgctacaaagagtctgctttgtcagtcttaagctccctgttttaatgttaacactggtcagctgagcctaagctccaacagggagagggtatagtgagggagtccaaaccaccctccccttcctgtcatggcctgaactggttttccaggtttctttggaatccccttggattagcattttattttttcatttgcaacttttaaatataagttccaactttaagtcatttctttgctcccatatcttaccctagactgttagaagcaaccaggtcacaccttagaaacgtctgcttagaaatgtcttccccagatgccctaagtcatcactcttaaggtcaaacttccacagatccctagggcatgaacacaatgcagccaagttgtatcttaggatttaacaagcgtgacctttactccagttcccaataagttcctcatttccatctgagatttcatcagcctggctttcacagtgcatatgtctatcagcattttggtgacaaccatttaatagtctctaagaaattccaaactttccctcatcttcctgtcttcttctgagtcctccaaattcttctaacctctctgcctgttacctaattccaaagctgcttccacattttcaggtatctttatagcaatgttccactcctcaataccaatgttctgtgttagtttgtgttactagaaaaaaaaatacatgaggctagtaatttataaagaaaaggtgtttaggccaggcactgtggctcatacctgtcatcctagcattttgggaggcagaagcaggaggatcacttgagctcagaagtttgagaccagcctgggcaacatagtgagaacttgtcttgaaaagacaagaagaagggaagggcgggggagagcagaagagcagaagggaaacacggccctggcatctgcttctggtgaggcctcagggagattgcaatcatggcagaaggcgaagggggagcaggcatgtcacatggcaagagggagcaagagaaaagaagtggcacgtcccagaattgtaaacaacgagctgtcacagggactaactgagggagaactcactcatcacctgggagatggtgctaggccattcatgaggggtccagccccatgatctaatcacctcccaccaggcccacctccaacactggggcctgagagagaagagaacctcccccagcactcggtgtgcatcggtagtgaaggagcctcacctgagcccccgctgttgctcaatcgaattcccaagaacagagagaaaagggaacttccagggtggcccgggcctccaggggttcccactccatttttagctgaaagcactgaggcagagctccccccacccaggctccactgcccgacacagaaataacaaccacggttactgatcatctgggagctgtccaggaacccgacagggagccggacgggccacaccagccacaggcaccaaatggacgacccggcgcttcaggtatcccagcccaccgggagccccaatcaaggggccggcccaggcagcagtgagggagaggctgcctgggtccctgacagcgaggggactcctgggccaccctcacagcatcaaccaagcttcttagttactgcatggactccagacgtcccttccctgcatggggacacaggaaagctagaaacagcctaacgccgacctggagaaggcagggggctgggaatcttggctgggcccaagactaagaaggtcagaggccccatgctgggcagggctaggctgggtgcagactgcctgtcacccccaggacagggacagccaacccagagccgggagggagggtggggaggcggcagcagggagctgtcctgagctccactgcgcaactggctgatcttggcaagtccgagctgggtggactgaggggggcttggctgagtggactagactgagacgggcctaacagactgagctgaggcgagctgggtgggctgagagggctaccctgtcccttagaggacaggtggccaagctgggctgtcctgagccagggcgatcggggctggcccgggccaggcgggtttagctgagttgagtgagtggactgggtagagggaaatgagctaggctcagctgagctaggcttgagctgggttatcctaagccctaaggtggactgagctgggctgagctggacttatctggggagcagggcaaagtcaggctgagctgaggtggcctgccctgggtggtccaggattgagttaagctgaattaggctgacctggacttgactggacttggttgaaataagctgggccgacacaggagtagggacaagctacagttctctacttaggataaaatgggtgctcgtggactatccgggctgaaggagaccaagctggggtattacctgctgagcttacctgacctggcctgagttcagcagggctgcgctgagctggacagacctgagccaagcttagctggttgggctgagtaagctgggctgagctaaatgggattgagctgaggagggctaggctgggggagagacctgacgacggacagggttaaaagctggagtgagcaggccttaaattattgaactaaattgggctggggtgatctgaatttagctgggatgagctgggctgggctgaactgtgcccacgtgaactgggctaaactaggctcgcctgagtggactcagctgggttggtctcaactgggttcagctgagctgggctcggctagactacactgggttcagctgacactacactgggttcaacccgagaggggtgagcgcctacctaagccggcccagcccgttcgacctgttcatccgcaagtcgcccacgatcacctgtctggtggtggacctggcacccagcaagtggaccgtgaacctgacctggtcccgggccagtgggaagcctgtgaaccactccaccagaaaggaggagaagcagcgcaatggcacgttaaccgtcacgtccaccctgccggtgggcacccgagactggatcgaaggggagacctaccagtgcagggtgacccacccccacctgcccagggccctcgtgcggtccacgaccaagaccagcggtgagccacgggcaggccggggtcgtggggggagggagggagcgagtgagcggggcctgggctgaccccacgtctggccacaggcccgcgtgctgccccggaagtctatgcgtttgcgacgccggagtggctggggagccgggacaagcgcaccctcacctgcctgatccagaacttcatgcctgaggacatctcggtgcagtggctgcacaacgaggtgcagctcccggacgcccggcacagcacgacgcagccccgcaagaccaagggctccggcttcttcatcttcagccgcctggaggtgaccagggccgagtgggagcagaaagatgagttcatctgccgtgcagtccatgaggcagcgagcccctcacagaccgtccagcgagcggtgtctgtaaatcccggtaaatgacgtactcctgcctccctccctcccagggctccgtccagctgtgcagtggggagggctggccagaccttctgtccactgttgcaacgaccccaggaagctacccccaataaacagtgcctgctcagagcccagggtacacccgttcttgggagcgggcagggctgtgggcaggtgcatcttggcacagaggaatgggccccccaggaggggcagtgggaggaggtgggcagggctgagtccccccaggagaggtggtgggaggaggtgggcagggctgaggtgccactcatccatctgccttcgtgtcagggttatttgtcaaacagcgtatctgcagggactcatcacagctaccccgggccctctctgcccccactctcggtctaccccctccaaggagtccaaagacccaggggaggtcctcagggaaggggcaagggagccccgacagccctctctcttgggggcttggcttctacccccctggacaggagcccctgcacccccaggtatagatgggcacacaggcccctccaggtagaaaaacagccctaagtgaaacccccacacagacacacacgacccgacagccctcgcccaagtctgtgccactggcgttcgcctctctgccctgtcccaccttgccgagtcctggccccagcaccggggccagtggagccgagcccactcacaccccgcagcctccgccaccccgccctgtgggcacaccaggcccaggtcagcagccaggccccctctcctactgccccccaccgccccttggtccatcctgaatcggcctccaggggatcgccagcctcacacacccagtctcgcccactcacgcctcactcaaggcacagctgtgcacacactaggccccatagcaactccacagcaccctgtaccaccaccagggcgccatagacaccccacacgtggtcacacgtggcccacactccgcctcccaccctgcctccagcgaggctactgccaagcccttcctctgagccatacctgggccgctggatcccagagagaaatggagaggccctcacgtggtgtcctccagtccaaccctccctgtcaccctgtcagcagcaccccacagccaaacacaggatggatgcgtgggctccatcccccactcacccacaccggaaccccagagcaggctacgtgcccctcacagacctcaaacccacatgtgcatctgacaccccagatccaaacgctccccccggtcatgcacaccaagggcacagcacccaccaaatccacacggaaacacgggcaccgggcaccccatgagcacaaagcccctccatgtctgaagacagtccctgcacaccgtcacagccatacattcagcttcactctcacgtcccagcccacctgcacccagctctgggcctggagcagcagaaagaggtgtgagggcccgaggccggacctgcacctgctgatgacccgggaccagcaggcagctcacggtgttggggaagggagtggaggggactcagggcaggagccagagggaccaggctggtgggcggggccgggccggggtagggccaggaggcagctctggacacccacaggcctgggctcatagtccacaccaggacagcccctcagagcacccatgcagtgagtcccaggtcttgggagccaggccgcagagctcacgcatccttccgagggccctgagtgaggcggccactcctgtgccgaggggttgggtccttctctggggagggcgtggggtctagagaggcggagtggaggtaaccagaggtcaggagagaagccgtaaggaacagagggaaaatggggccagagtgggggcccagggacgagaggtcaggagtggtcggcctggctctgggccgttgactgactcgggacctgggtgcccaccctcagggctggctggcggctccgcgcagtcccagagggccccggatagggtgctctgccactccggacagcagcagggactgccgagagcagcagggggctctgtcccccacccccgctgccactgtggagccgggagggctgactggccaggtcccccagagctggacgtgtgcgtggaggaggccgagggcgaggcgccgtggacgtggaccggcctctgcatcttcgccgcactcttcctgctcagcgtgagctacagcgccgccatcacgctcctcatggtgggcacccacctccaggggcccggccagggcagggggttgggcagagccagcagagcgccctgacccacgccctcccctcaggtgcagcggttcctctcagccacgcggcaggggaggccccagacctccctcgactacaccaacgtcctccagccccacgcctaggccgcgggccactcacgctccaccaggcccagctttttctctgccagcgcctgagcctccctcgggctgcgccctgccctgggtgggaaaagggaagcagacaagaaaagggggcacaaggtcactactgtgggctgatggccagtgaacctgagcccagagggggccggctcagccgcaaggttaaaggcgccgagagaaccaccagtcgcagcccccacccgaaaaccgtgtctgtcccttcaacagagtcatcgaggaggggtggctgctagccgttctgagctcatcccaggcccctgggtctccgggtcactcccattctgactgtacaatcaccaaaagccaaggagggcccagcacccagcccaggacacagctgagtctgcgtccagcccaacaccagcccacggcctcactccccagcctcggtctgacccttctagccctgagatccaagtgcctggcatccccgtcccccaagcctcacccagaccttctttcccttcacccacccctcctgccacccatccacagcccccatcccttcacccacccctcctgccatctatcctcagcccccatcccttcacccacccctcctgccatccatccacagcccccatcccttcacccacccctcctgccatctatcctcagcccccatcccttcacccacccctcctgccatccatccacagcccccatcccttcacccacccctcctgccatctatcctcagcccccatcccttcacccacccctcctgccatccatccacagcccccatcccttcacccacccctcctgccatctatcctcagcccccatcccttcacccacccctcctgccatccatccacagcccccatcccttcacccacccctcctgccatctatcctcagcccccatcccttcacccacccctcctgccatccatccacagcccccatcccttcacccacccctcctgccatctatcctcagcccccatcccttcacccacccctcctgccatccatccacagcccccatcccttcacccacccctcctgccatctatcctcagcccccatcccttcacccacccctcctgccatccatccacagcccccatcccttcacccacccctcctgccatctatcctcagcccccatcccttcacccacccctcctgccacccatccaaagcccccatcccttcacccacccctcctgccatccacctcagcccccatcccttcacccacccctcctgccatctatcctcagcccccatcccttcacccacccctcctgccatctatcctcagcccccatcccttcacccacccctcctgccatctatcctcagcccccatcccttcacccacccctcctgccatctatccacagcccccatcccttcacccacccctcctgccatccacctcagcccccatcccttcacccacccctcctgccatctatcctcagcccccatcccttcacccacccctcctgccatctatcctcagcccccatcccttcacccacccctcctgccatctatcctcagcccccatttctgcagcctgaaggcacagggaagccctctgaggccaggccacaggacggttgagggcttcgggcccctggagtgggtagaggggctcccacagccagagaaggggtttcctgcagggacagcagctgccgacctcgtccctatgacctcgtccagtgtctggcttcagcagtcatacttctttctctctgagtttcttagtaaagatccttttcacaaaccccacgtctccggagggctctgtaggaggtgtgtgtggccctggagtggctggtgggaggcaggacccctgaggacgtgcaggaggagccagaggggaaggaagggcaggggccattctggggtcctgagagccaaagtgcccaagcagtggttcccatcaatcacccctcagcaccccagagactccccagctcagcgctgtcatacctggtctgctggtctccagcccagactcatgcctccttctcaggtaaagtcaaagcaacaatcaacatcgacccctttgtgggcaaaaccagaagaggcccatgctgtggtcagcacaggaggccccaagaatgcagctgcacagtcaccaaggtggaggctggtgggggcccccaggaccactggccacacaccctgatccagcacccactgagcacagacaaagctgactccccagcccacagccgcccaccagcctggacctcctgaagagctgagaggtgacccaggagcaggctggggccccagagccatcggggccacaggtgggcttgacccacaccagtcctcagggcaaatgtgcagcctccctggctggagaggcctgcttacaagggtctccacaacatcctaaaaatgggagagaacgcatgataggcatgacaaagggcagggttccctcatatacaaagagcactcagagatcactaagaagaaaggtgagcaataggttcttcatggaaaggaaaaacccagtggccgataatataaagaaaccattttaacaatgagaaaagtgaaaggaaggaggaggggatgaagggggtggaggtgcttcttggccctgactgagggcacgtaaatcattaagaccactttttagggccagttggcaaaatgccccaatgcaggagagtcctctcacagtgatggccccacagggagagcctcgctctgtgccaggagagccacgtcacatggagtctggcacaaagcggaatgaagcaagcctgcctcagtctgacagcggcacctgggccctccgccctgtcctctgctgcgacctcggagcagccgggcacgggggagaaggtgaggagcgacggctccctacggggtagaaaaccccaaagcgggcagcgctgaggctgactgggtccaaacaacatcagaggagggggcgtcgcaggacagggccaaggccacagccgctgcccagctcccctcacacactccctcattcacagacacacacgcgggcacacactcgcacatgcaaaaacacacaggttcacacacacagactcaacctctcatacacatttgcactcacacacaccaatcatgcactcacacaggctgacacgctcgggcacgctcataccaacacacacacagtctcaggaagccaggccctccatccaccccatcaccagcccagggtgtcgcaaacccacatctcctacaacagaccggccctccgcagccaaggtgccccggaccgggagcccccccgggggacagagctcagtgactttctctgccccgcaccctagatcatgagacctccatggccccagagcaagggcaaggagtcagctcactgccccactgtgtggcaggcgtcctcacgcacagaaaattccatcgcctcaaaggcctgagaggaagaccagatgagcacccacgtagaggagacagacggggcccgtggggaggggcagaggcccggattcacacccaggctcggaacagcgcccctgccttccacatggcctggcctcccgggagcaagaggatgccgtctcagggcctctccatccccctcttcattcccctattaacccacccgtgggtacaaccatggcccccaaaagatagagccacatcctagcccctggggccattgagtgcggcgttatttgtcaaaagggcctttgcagatcccatcaagataaggatttcgaggtgagggcaccctggattgtcaaggatttcgaggtgaaggaaccctggattgtcaaggatttcgaggtgaaggaaccctggattgtcaaggatttcgaggtgagggcgccctggattgtcaaggatttcgaggtgaaggaaccctggattgtcaaggatttcgaggtgagggcaccctggattgtcaaggatttcgaggtgaaggaaccctggattgtcaaggatttcgaggtgaaggaaccctggattgtcaaggatttcaaggtgagggcaccctggattgtcaaggatttcgaggtgagggaaacctggattgtcaaggatttcgaggtgagggaaccctggattgtcaaggatttcgagatgagggaaccctggattgtcaaggatttcgaggtgagggcaccctggattgtcaaggatttcgaggtgaaggaaccctggattgtcaaggatttcgaggtgagggcgccctggattgtcaaggatttcgaggtgaaggaaccctggattgtcaaggatttcgaggtgagggcaccctggattgtcaaggatttcgaggtgaaggaaccctggattgtcaaggatttcgaggtgaaggaaccctggattgtcaaggatttcgaggtgagggcaccctggattgtcaaggatttcgaggtgagggaaacctggattgtcaaggatttcgaggtgagggaaacctggattgtcaaggatttcgagatgagggaaccctggattgtcaaggatttcgaggtgagggcaccctggattgtcaaggatttcgaggtgagggcaccctggattgtcaaggatttcgaggtgagggaaccctggattgtcaaggatttcgaggtgaaggaaccctggattgtcaaggatttcgaggtgagggcaccctggattgtcaaggatttcgaggtgagggaaacctggattgtcaaggatttcgaggtgagggaaacctggattgtcaaggatttcgagatgagggaaccctggattgtcaaggatttcgaggtgagggcaccctggattgtcaaggatttcgaggtgagggcaccctggattgtcaaggatttcgaggtgagggaaccctggattgtcaaggatttcgaggtgagggaaccctggattgtcaaggatttcgaggtgagggcaccctggattgtcaaggatttcgaggtgagggcaccctggattgtcaaggatttcgaggtgagggaaccctggattgtcaaggatttcgaggtgagggcaccctggattgtcaaggatttcaaggtgagggcgccctggattgtcaaggatttcaaggtgaaggacaccctggattatcgagggggctaggtccaaggacaagtgtcctagctggagacagacgaggagacacagggatggggagaggcagaggcagacaggggtggtgctatggtctgagggtctgtgtctgcccgaaactcctgtgtgacagccgtcatcccagagtgagagcatgcagagctggggcctcagggaggtggttagggcctgagggggaaccctcaaaaatgtgattcggtccctaatctcactagagaccctaaagaaaagggaccccagagagcagccctgccctctttccaccacgtgaggacgcagtgaaaagatgggggtctgtgaaccaggaatcgacccttcctggaacttgaccctgctgccatcctgaccttgaacttccagcttcgagaaccgtgagaaatgaatgttgctgctgaacccaccagtctatggtatttttgttattgcagccagaaatgactaagatgcagcagccacgtccccctggcgagggccgggggcatcccaaggttcataacaaaagctccagagcttccctgaaccgccaggtgtgtcttcccaggaccctggggcagccccaggctacctccctcctcctctgaccccacctgccctgatccggcctcactgtcactccctggatttcacccgacagcctccgccggggtggcccggccccatggccagggcatcttccattcacgcccacgctttccaggactccgctgcagcagctcctctgtgaagcgcctctggcctcccattgccggtgccacccgagcccccagacatagctggcctcccccgactccagggccagcatcgctggcgggatctctccaacgcaacggccagctctctggtgacccacagtaggagtgccacctgggcagcgctggacagggtagagcaggcaccttggccaccctgacccgcagggctgcaggctaggagacggggtgcccccatgcccccaccctgggctgcagtctggggcccccagcggcccatggggcagaccgagggaggccaggccggagtggctccaacccagcagcgcaagactcactctccccagcctgatgcccgccctgtggccccaaggccccctcaacgggagtccactcacaggcacccttcccctgcgggtggtcggggaccctctctggccctgtgtctcccctttgccatctctgtctcggggtctctgagcctctaactgtgtctgttcctgtttccctgcatcgtggcccccaccccgccctgtggagccatgtggagccatgaggctccacggccggtggggtcacagagccctggccacacacacctggccccaccacagccagaccacaggccagacatgacgtggagccgcgcggccgtgtctgctggggcaggaagtgggcgagtgaccctgtctgtaggccagacgtacgggcatgcaggccctcccctccagcccctcagcatccagccacatctgtggacacagccagcgaggcagagcagggctctgctaaggacagacggccatcaaggcagggcctgggccgggccagggctccctccccacagcagccctcttggcaggcagccagacgcccgtgagggtggacctgccatgagggcctgcacgccggaggccgcccactcagcactgcgggccctccagcagcctgaccaggtgggtcttggaggtctccaggcctccgtctcctcctctgcacattgaggagtccagccaggctggtcctggccccttctggaagcaaaaggtggagaacaggcaccaagacaagagggaaggacaaaagaggtcaccacagggactccggaaccacagggcagggcttcctaaccaggcaggaaggatctgggcactgggggctgagccaggctggccaggcctaaccagggatgacccggcccttcctgggatacaaggtgaacaggtttcatggctgagctgaggcctaggctgagccgagccagagggcaaagaagatgacgtggagccagctgatacacgtccatgtgggctgccctgagctgccctgggctgggctgggctgagcaaggctaggctgaactgggctgagctgaactggtctgggctgagctgggctgagctaggctgggctgagctgggctgggctgagctagtctgggctgagctggactgggctgggctgagctggactgggctgggctgagctggactgggctgggctgagctgggctgagctaggctgggctgagctagtctgggctgagctggactgggctgggctgagctgggctgggctgggcttggacgagctgggctgggctgggttgagctgagctgagctgagctgggctgagctgggctgggctgggctgggctgggctgagctgggctgagctgggctgggctaagctggactgggctgggctgagctggactgggctgggctgagctagacttggctgagctgggctgggctgggctgggctgagctgggctaagctggactgggctgagctgtgctgggctgagctgggctaagctggactgggctgtgctgtgctgagctgggctgggctgagctgagctgggctgggctgagctgagctgggctggactgggctgggatgagctggactgggctgggatgagctgggctgggctgggctgagctgggctgagctgggctgggctgagctgagctgagctgggctgggctgggatgagctgggctgggctgggctgggctgggctgggctgggctgggttgggctgagctagactgggctgagctgagctgggctgagctggactgggccgggctgagctgggccgggccggattgggccgggccgggccggactgggccgggccgagccgggccgggccgggctgagcgggtctgagctgggctgagctgagctgggctgagctagaccaggctcgggtgagctaggccaggctgggctgggctgggctgggctgggctgagctgtgctgggctgggctgggctgggctgagctgtgctgggctgggctgggacaagctgggctgggctgggctgggacgagctgggctgggctgggctgggatgagctgggctgggctgagctgagctagggtgggctgagctgagctgggttgagctagaccaggctggggtgagctaggctgggctgggctgggccgggttgggctgggccgggctgggccgggatgggatgggctgggctgggctgggctgggctgggctgggacgggctgggctgggctgggctgggacgagctgggctggcctgggttgagctgagctgagctgagctgagctgggctggcctgagctgggctgggctaggctgggctgggctgggctgggcttggacgagctgggctgccctgggttgagctgagctgagctgagctgggctggggtgagctgggctgggctgggttgggctgagctagactgggctgggctgggctgggctgagctgggctaagctggactgggctgggctgggttgggctgaactgggctgggctgagttgggctgagctgggctgagctgagttgggctgagctgggctgagctgagttgggctgggctgagctgggctaagctggacctggctggggtgagctaggctgggctgcgctgagctgggctgggctgggctgggctgagctgggctgggctgagctgagctgggctgacctgggctgggctgacctgggctgggctaagctggactgatctgggctaggctgggctgggctgacctaagctgagccagactgggctgagctgggtgagcttaggtggattgagctggactgggctgagctgagctgggctgagctggactgggctaggctgagctgagcttggttgggttgacctgggctgagctgagctgaattgggttgacctgggctgagctgggttcggctgggctaggctgacctgggctgggctgagctgagctaggcttggatgagctgagctgggctgggttggactgcgctgggctgggttggactggtctgggctgacctgagctgtactgagctggtctgacctgtgctgagctgggctgggctaggctgagctgggctgacctgtgttgggctgggctgggctaagctgggctaggctgggctgagctggacggagctgacctgggtgagcttaagtggactgagctgagctggactgacctgggctaagctaagctgggctgacctgtgctgggctgggctggactaggctgggctgagctggactgagctgagctagactgagctgagctgggtgagcttaggtggactgagctgggctgggctgagctgagctggactgggctgggccgaactgagctagactgggctgagctgggctgagctggggtgggctgagctaggctgagctggggtgggctgagctgggctgagctaggctgagctgagctgggtttggttgacatggactgagctgtgttgagctgggctaggctaagctaggctgggcggagctgagctgggttgggctgagctgaactgggctggactgggctggactgggctgggctgggctgggctgggctgagctgagctgagctgtactgagctggcctgggccaggctgagctgggctgggctgagctgtactaagctggcctgggctgggctgagctgtactgagctggcctgggctgggttgacctgggctgagctggactaagctgggctgacctgggctgggatgggatgggctaggatgacttgggctggactgggcgggactgagctggactggcctgggctgagctgggctgggctggactgagctggactggcctgggctgggctgggcgggatgggctgaggtggctgctaatgtgggaaagaggccgtgggttgagtgtgattccacctgcagagccctgagcccagctgtgttcttaggggttctgagggccacgcagctctgttgcaccatgattctgtcttctctcttgcccactgcctgaaggaaatttggagtgggctgggcccagagctcccctgtatagcaggccctgtcctggagggcctggcagggacatggcttagcctgttggcctctagtcccgagacctcataggccacaggggtccactgtggcttgtttgggcctggggtggggctcatggagtggtgggtgttggactgagactctgaccagggacagggggatggggtcacagccaagccactccacccctaccccatgcacacagcactcagagcccagaccctctcctaagagcccccaccaaaatcctctctaggggcaggggatagagcaagacatgtcccccacccagagcaggggctgcggtcagggagctcaggggactcagccactccatggcagagccctgtttaatacaacttgtgtctgggatggcctgaatcagagaccctatctaaggagcatgttcagaaaccatgttgctgggatcagacagcagggtccaactgcaggcctgtggtgcaggagctgtgtgaccatggggctgtcaccaggcctctctgtgctgggttcctccagtatagaggagaggcagtatagaggagagggccgcgtcctcacagtgcattctgtgttccagcatccccgaccagccccaaggtcttcccgctgagcctctgcagcacccagccagatgggaacgtggtcatcgcctgcctggtccagggcttcttcccccaggagccactcagtgtgacctggagcgaaagcggacagggcgtgaccgccagaaacttcccacccagccaggatgcctccggggacctgtacaccacgagcagccagctgaccctgccggccacacagtgcctagccggcaagtccgtgacatgccacgtgaagcactacacgaatcccagccaggatgtgactgtgccctgcccaggtcagagggcaggctggggagtggggcggggccaccccgtcgtgccctgacactgcgcctgcacccgtgttccccacagggagccgccccttcactcacaccagagtggaccgcgggccgagccccaggaggtggtggtggacaggccaggaggggcgaggcgggggcatggggaagtatgtgctgaccagctcaggccatctctccactccagttccctcaactccacctaccccatctccctcaactccacctaccccatctccctcatgctgccacccccgactgtcactgcaccgaccggccctcgaggacctgctcttaggttcagaagcgaacctcacgtgcacactgaccggcctgagagatgcctcaggtgtcaccttcacctggacgccctcaagtgggaagagcgctgttcaaggaccacctgagcgtgacctctgtggctgctacagcgtgtccagtgtcctgccgggctgtgccgagccatggaaccatgggaagaccttcacttgcactgctgcctaccccgagtccaagaccccgctaaccgccaccctctcaaaatccggtgggtccagaccctgctcggggccctgctcagtgctctggtttgcaaagcatattcctggcctgcctcctccctcccaatcctgggctccagtgctcatgccaagtacagagggaaactgaggcaggctgaggggccaggacacagcccagggtgcccaccagagcagaggggctctctcatcccctgcccagccccctgacctggctctctaccctccaggaaacacattccggcccgaggtccacctgctgccgccgccgtcggaggagctggccctgaacgagctggtgacgctgacgtgcctggcacgcggcttcagccccaaggatgtgctggttcgctggctgcaggggtcacaggagctgccccgcgagaagtacctgacttgggcatcccggcaggagcccagccagggcaccaccaccttcgctgtgaccagcatactgcgcgtggcagccgaggactggaagaagggggacaccttctcctgcatggtgggccacgaggccctgccgctggccttcacacagaagaccatcgaccgcttggcgggtaaacccacccatgtcaatgtgtctgttgtcatggcggaggtggacggcacctgctactgagccgcccgcctgtccccacccctgaataaactccatgctcccccaagcagccccacgcttccatccggcgcctgtctgtccatcctcagggtctcagcacttgggaaagggccagggcatggacagggaagaataccccctgccctcagcctcggggggcccctggcacccccctgagcctttccaccctggtgtgagtgtgagttgtgagtgtgagagtgtgtggtgcaggaggcctcgctggtgtgagatcttaggtctgccaaggcaggcacagcccaggatgggttctgagagatgcacatgccccggacagttctgagtgagcagtggcatggccgtttgtccctgagagagccgcctctggctgtagctgggagggaatagggagggtaaaaggagcaggctagccaagaaaggcgcaggtagtggcaggagcggcgagggagtgaggggctggactccagggccccactgggaggacaagctccaggagggccccaccaccctagtgggtgggcctcaggacgtcccactgacgcatgcaggaaggggcacctccccttaaccacactgctctgtacggggcacgtgggcacaggtgcacactcacactcacatatacgcctgagccctgcaggagcggaacgttcacagcccagacccagttccagaaaagccaggggagtcccctcccaagcccccaagctcagcctgctcccctaggcccctctggcttccctgtgtttccactgtgcacagatcaggcaccaactccacagacccctcccaggcagcccctgctccctgcctggccaagtctcccatcccttcctaagcccaactaggacccaaagcatagacagggaggggccacgtggggtggcatcagaagcaggccagtgagacagggcctgcccagggccctctgcatgcctctggcttctgcctggggctcccaggagtgtaagaacagtcccacaaccactgtggggacacctggcacccagactcccacaagggggcagtggggcccctgctcgtgccttagacatcttccgggcctccccagggccccccgccttctggctgcctccctctgctctcagggccaaggtgaggtggaggccactgtcacccctgagggtccagtcaccagagggtaattgagagcaacaggtcactcggggaagccctgccacagagaagccctccagcccatgggacccaggacctggcccaggggaggggcttttaaagagagggggaaagagggagaatcaacagatgaggggctgaaccagcagacagagatcaggcagacacatgggtagatcctaggacatataatgaatggatgggtggatggaggattggtagacggaggatggatgggtgggtaaatggctggatggaggatggacagatggatatatgatggatggatgaaggacgggtggatggaggatggatgagtggatgaatgaaggatggaagatggatggatggatgggtggatggactgatggatgatggatggatggatggatggatgatggatggatgggtaggcggatggaggatggaagggtggatggaggatggaagatagatggaggggtgaatggaggatgggtggactgacggaggattgaggatactggggtgggtgggtgggtagatctatggaggataggtgtatggaagataattggatggagaattgctttatgaatggatgaatgaagagatggaaaatagctttatagatggatgggtgaatggatggatggatagatggaagaaggatgaatggatggaaaatagctttatagatatatgggtggatatttaagtgatagccttacattaatagatgaatggaggatgaatggttgggtgagtgggtaggagtgttactgatggaggggtggatatacggataatagctttatagatggatggatggatagatggatggaaggatagaaagacaggtgaatgactggatgtatcagcatatgacaagcaggtacagctgtacatgggaggtctatgccctgagaccctgaggaaaatgaggatgcccgtgctggtggccctcacctggccctcgcttgtaacccctcagccacattccctgggaaggcaacagaggcctctggtcttgcccattcaacctttggcacactgagtgtcagacccaggtctctgtcttggacccagatctccttgagggtgggtgtgtctggtcctctctggccccgggacccagtcactgaatacgtggctgggactgagacggggtggggtgggaggggcgggagggtacctcgggctcaagcttcccttggagaagcagatggtgtccactttctgccctgccaagtctctccctgaagtgccctaagaatgtcaaagacagaaggtcccagcccctcacctgggactctgcctcctcatcctccctgggggagtctcaggccttagatggggacccagaccccactgtccccagaccccaaggaagcatagccgctgttcacacgagtctgggcctggcaggctcttgctgtgttgcagattggcagatgccgcctccctatgtggtgctggacttgccgcaggagaccctggaggaggagacccccggcgccaacctgtggcccaccaccatcaccttcctcaccctcttcctgctgagcctgttctatagcacagcactgaccgtgaccagcgtccggggcccatctggcaacagggagggcccccagtactgagcaggagccggcaaggcacaggtgggagcccaggagggggatgagcccacagtagatgaggtgggctgcagtgcttggctaagaggagagcaccacctgctcccactgtggggggacgtgctctcctggggggcccttcacagacactgaggacacgcgcaggcccagggtcagggctgagcttccctccagtgcagtaacgaggattccgtccaggctcccatgagccaggccagggctgagacagagggcgttggcaaggatgctgctccttcaggctgtgacccctctgtctttgcagggaggaagtgtggaggaacctcttggagaagccagctatgcttgccagaactcagccctttcagacatcaccgacccgcccttactcacatgccttccaggtgcaataaagtggccccaaggaaaatgttcacagactctgaatgaggagacgggggtcagggaaagggtggtggctttagactggagaacgcctgcttcaaagtccccctgggtgtcatggtggtcatggtgggcatggacagagggtacccctggtcccaaaatcaagaaatgacctgatcttgaatgaggctgaggcccaaggatgaatgctggattcaccagagaccatggcaaagaagcctgctcctaagaactacatgggatccctgttcctcataacctagacagccctggtcctcctcactgggtcctcatcctgatcacagggccctggtcctgaccagtgggcccgtttaccgatcactgagctctggtcctactacttggtccctgttcctgatcacttaattctagccttgatcactgagccttagtcctgatcactgagtcctactcctgtttttggccctggacctcatcactcagccctggtcctcatcactcagccccggtcctggtcactcagccctggtcctcgtcactgagccctggacctcctcactcagccctggacctcctcactcagccctggacctcctcactcagccctggtcctcatcactcagccctggacctcatcactcagccctggtcctcatcactcagccctggacctcctcactcagccctggacctcatcactcagccctggtcctggtcactcagccctggacctcgtcactcagccctggacctcgtcactcagccctggacctcgtcactcagccctggtcctcatcactcagccctggacctcatcactcagccctggacctcctcactcagccctggacctcatcactcagccctggacctcctcacttagccctggacctcgtcactcagccctggtcctggtcactcagccctggtcctcatcactcagccctggacctcatcactcagccctggtcctcatcactcagccctggtcctgatcacccagccctggtcctgatcactcagtcctggtccagatcacacagccctggtcctgatcactccatcctagtcctcatcactcagccctggtcctgatcacccagccctggtcctgatcactcagtcctggtccagatcactcagccctggtcctgatcactcagctctggtcctgattattagatcctgatgctagtcactgggcactgggcactgggccctgatcctaatcactgaaccctgctcctgatcaatgaaccctggccctgatcaaagggctttgctcctgatcactgggccctggtcatgctgtgttctggtccttacccctgaactctggtcctgattactgagtcttggtcctgatccctgagtcctagacttgatcactcaattccagtcctcatcagtgggccctggtcgtgatcactgagccctgatctggatcactaggctctggtcctaactcagtcctggtctggatcgctgagtcttgatcctgatcactgggccatgttctggatcaatgagccctggccctgatcactgggccctggtcctgctaactatgctctggtcctgaccactgagcccttgtcccagtcaacagtcaataactgagctctggtcctagtcaatagtcaatcactgagccctggtcctgatcactgggtcctggtcctgatcactgggtcctgttcttatccctgaatcttggtcctgatcactgagccctggccctcatcactgggtcttgttcctaatcactgggctctggttctgaccaatggcccctggttctggtccctgactcctggtcctgatcaatgggctctgctcttgacttctgagtcctggtgctgatcatccagtcctggtcctgatcactgggccctgattctaatcactcagacctccttttgatcactgaaccctagtatttatcactgagccctgatcctgatcgttgggccctatttctggtaactgagctctgatcctgaccactgacctctgttcctaatcactgagccctggaccagatcactggcccctggtcctgatcactggcccctggacctgatcactgacccttgttcccgattgctgagccctggacctgatcactgagccctgttcctgatcactaacccctattcctgatcactgagccctggtcctgattactgagccctggacccagtcaatgacccctgttcctgatcactgagccctggaccaaatcactgagccctggaccagatcactgggccctggtcttgatcactgggccctggtcctgattactgagccctgatcctgatcactgggccctgttcctgaccactgagccctggaccagaccgcggatccctgttcctgatcactgatctctggttctttaattatgcatattcattttgaaatctgattccttttctgagcatgtatcagtctgactagacactgagtcctgtctgatttctgagccttggccctcatgagtaagtgacctgcagtggtggagggaggcctccaggggagccgagaccctctcagtgcatgtactcactggtagatgaagaaatgaccccaatgacttgctccatttttccaggctcagaggggtgtgtaggccccaggaggacttggtggcgagaagaccagcccaggccctgtgagctacacccagccccagcccctaaggggtcgccaggtctcgacttagcactggggagggggtacagtacaggagtggggacaggaaggtgaggggaggccatgccgtttgtattctcttgcttttctctctctcctgaagcctcttgaatagacctgcagaaatacccaaaatagccctgtggggtggctgagtcattgtgaacacagcccaggtcaggtgttccagccagagaactgctgttctgagaaacatgccccaaaaccgagacctggccaggtgtgcctggggcctgagcgaggggctgcagccacaggtaggcccagccccaaccagcccagggtcagctagggctttccaggtccagggttaggcagaggtcagccagggtcaaccatggtctatctgaggggagagacaagagacacagagacatagagagagagagagacagggatggggagagacaagagagacaggaaaggagagacaaagacagacacagagagagagatggggatggagagagataagagacagggacagggagggacagaggcgaggccagtgacagagacagagttacaagagacagaaagagagagagatgagatgagagagataagaagaaacggagacagagatgggagaaaaagagaggagatgggaacagggaaaaagagacatggagacagacatgcagagagaacacaacagaggcagagaacacacagggagagaaagaggcagcaagatgggcccaggaactcagctgcaagcccctctcacacagtcactctcacaaacacacaccacgactattatacaacattcacacacaaacacacagaaacatacccacgctcacagccacacactaagtcactgtcacatccatacccacactcacacccaaacacacatggcccaggagcaaatggggagacctcagcctgcagctgggagcggccgagcgggcgctgggccagagtcggggcctgtctgtgggtggggggcacggcagcacgggcccacctgcacctacaaggcctggcccccgaggtcactgggccaccacccagccctcgccctgttccccgtctgtgctggccggggcaggactctgagcctccaggaaacctgcagatccacacaggacccggaacatcgggctggggtgggtaacaacatgggagaggcgggagcaggaggtcccaggaccctgcgcactgcgaccccagccctgggggctgaagcccaggacagcctcaggtctcccaggagggactggacagtgggggatggtcagagaacaggagagccagcagggtgcagcccgaggacagggatggacgctgggaggtcaacaggacaggggcaggggccgtggagtgggcgaaggtcctggagggcctagagaacctgtgggtccgtgtttgtgggaaggaggccaggagcagcccagagtggccaggctggcaggggtgaggaggtgggggcagtgaggtgagggtgaccgagccagtgaggcctctggccagggaggggaccttggctgggctctgactgaacccagggctcctggagaaggggccccaggcggggatgaggatgtgggcatctgactccatcaacaatggggcttccaacacgcacagcctgggcctcggagacctgggccctgacccgcctccccctggcactgggccgggtgccgtgtgtggtccccagtccccgcagcacctcccccacactggtcacgttccagggcccctctgaagcacctgctgtgaggggatgtggggaggggacagggacttgggcctgagctgccgggtcgggggggagtcggggacccaggctcagcgtgtggctggggaccagacagatggggatggaggaggacacgccctgtacccactgcctgccaaggggctggacccacgcccagtctaggccatgtcccccgaggcctgtgaaccttcactctgagccactaaaacattcaggagctttgaaagcagcccccgtccttgtcactatgcgatgactctgagcatcacgctgtccctgctggatccaccctccagccccagcgagggaggctgggccccgggcagcaggtggtgagggcagcgggcacagccaccctacagcacacacagggtctcagggacgcgtccaccacagcccgtgcacaggctcctcacggcactgagttcacccggggcgcgggccgtttgtcctcaggagtcccgctgtaccctccgcccccagccctgtcctgctgaggctgcagctgggtcccggggcacagggcggccctgagcactttgtcatcttggtccctgtcgggtgggctgctggctgtctgtggagctggcagagccgcggttcagccttggaggccggtcctggggcccagcagccgtggggagcactgcccagtcccgtgcccacagggaatcacctgggctgaggaagggcccacacgccgacgggatcggggtcaggcagcgcacgcctggcaccgagatcccacgtcccgaagtggggacacggcccaggggcactgttccgggagggtctcaagatggggtctcctatttcaatcttcactccttctgcacctgttagctgggaaccttctagaaggaggggtgtcctcaatcatggggtggttgtgagctgagcacagatcatgcaggaaggtacatggcttctccttcaccaggaaaacagtgcagagagacagagacacagagacagagacagagtaacagagaaagagagacagagagagacacagagacagagacagagtaacagagatagacagagagacacagagacagagacagagtaacagagatagagagacagagagagacacagagacagagtaacagagaaagacagagagacagagacagagacagagtaacagagagacagaaagagacagagacagagtaacagagatagagagacagagagagagatagagacagaggcaggcacagagataagaaagatacacagaaacagagagagacagagatagatagtcactgtcacattcatacccacgctcacctgctcacacactcacacactcacctcacactcacacacactctcacactcacagtcacttacactcacacacagtcacacacacacagtcacacacacactcacaaacacactcacacactcacacacactctcacacacacactgagcttccctcaggccctgtcacttccgatggggcctacggcctgtctaagcctctgggccaccagcccctggctcaccggtgtgtgcccaccacaccccgccttgggggtcccctctatgagctgggcacatgccctccgctctgttcatggctggcctgggggaaacagggcccacccaaggcctggctcagggaaggcctcaaacacacatggcccaggagcaaaggggcagagctcagcctgcagctgggagcgggcaggggtagtggagtgggcagagggcctggagaacctgcagggctccgatgtctctgggaagggggcccaggagcagctcagcgtggctgggccggcaggggcgaggaggtgggggccgtgagggaggggtgactcggctgtgtggggtgccgggggacacgggctttgctccggctgagcccaggcagtggcgaatccctgagctgccaggaggagagcagggccggggtcaggcagaggtgggccgcggggccgagggctgcggccggtcgggagcagtcggtcggttgagggcaccattacatggagggctgtgagacgggagaccccattcccttcattccttgtgcacgtgttagtgaggaaacttctagaaggagggcattgctcgtagtgggtgagtgtgagcacagatcatgcaggctggcgtgctgccgtgaagtgcctctctttactttccagacctcagcatggcaagcccgtcctgcgccccagggtctttctggagtacacgccgcgcggtcctggtgggcaccatacctggcacccacgctttggccgggcccgaaccttgcgccctcccagcccccatgtggctctcccttggccatactggccttttgccagtcctcctacctcaccctagggtctgcctggccctgccctcccttcctagccccccaaggaggctggagggcacccctgcgtccaccagcagcagctcctcatgggcgagtctccttgggccagtgacacatagtgtgccccgatggtgccacggcagcctgggccctccgccttcctgcttggcaggcacccccgctccctgcaccctcaccggggcacctgtgagccctgagggccagtgggggtctcactgctgctccctcccacagcctagcctcgggcctcagggctctgcatccaagcggcccagggctccctgcggtctcagcccgagtgggcctttgagccttcgcgttctctgcagggtgggacctgcccaagggctgctgagggcttcccaggggtcctgtgggtcccacctaggggcaagctggtgaggaaagtgggtcctgccatggcggccgggtgggctgagttttcggcatctctgggcccaacagcaggtccctggagcggcgcccacccctcccccaggcaggtgtgagggctctgatctgtttctccttgagtgactcattctgggcagacttggccctcagggcacatgcaaatggttgtttgttccacaccgaaaacatgtttcttgccctctgaggctgtttccagaaatagcttgcacgattctccacctgcagctgcagccgccacccacccagtgtggccaggctggcccaggcctccagattcggggacaccccccgccccctcccccagcgtggccaggctggctcaggcctccagattcggggacacccgccccctcccccaggacaggcccacttgggttactgacactgggaccaccctgcaaacgtcaactttattgaattcagtggttctgaacttgttgccatctttgggaccaggacccaggggcagcccccaggttggcaggaagggcaggggagccaacgctggcagggcccccagccaacccccaccccagaagccccaaggaggctgagcggaggtggccctggtggcctgggcacaggcagcccgattggtacagggccggtctggtgcaggcccgcacctcccccaccctcatggcctggtggtccccactgtacagagagaacactgaggctcagcagggccagggacatggcctgaggttacatggtgatgggggctgggtctccgggcctgggggccgtggtgggtgcagcacccggactgcgtgggctgtggcctccctgctcccagctctgtcacacccgtctccatctgagcctccagctccatctttcccgctgtccctgtctctggctacccttctgtctccctgtctctctgcctctctgaaggtatctccctgcccgaatctctgtctctgtcccattgtcggtgtctctgactcatctctgtcaagcccgtctgctgggctttgtcccgccatcttgcctgtcttggcctctctctctttctgtgtgtctccgtcggtgcctcctttctccatccatctctcccccgtgtctgtctctatccctccgtctctcttcccgtctatccctccctctgtgcctgtccctttgctgtgtccctttctttgcctctgtctctctgtctgtctcttcgtgtccctgtgtgtctctctctgtctctctgcttctatctctgtctttctgtatctctgtctatatctcagcctctttgtgtccctgtgtgtgtgtctctctcttctctgtctttccatgcctctgtctatatctctgtctctctgcctctgtatctctgtctgtctgttcgtgtccctgtgtatgtctctctcggtctctttctgtatctctgtctatatctgtctctctcatctgtctcttcctgtgtgtgtctctctgtctctctgcctctgtctctctctctctgtctcttcatctctgtctctgcctctgtgtcattttgtgtgtgtttctctatgtctctctgtctgtgtctcttcctctctgtagctctccctctctctgtctctccttatacctctctttctctctctctgtttctttctctgtctctttttgtctttctctgtctctctgtctctgtctcttcccctctatatatctctgtctttctgttgctgtctgtctctgtttctcttcagccctctctgtctctctttgtctctgtctttctctgcctttctaactctctttctctgtctctctgtctctatctcagtctctcttcttatctctgtctctatctctctctgtctctcactctctgtatctgtctttctcttatctctattgctctgtctctatctctgtctctctcatctctatctctgtctctatctctctttctgtctctctgtatctctctgtatctctgtctctgtaactctctttatctcttactgcctctgtttctctcactctgtctctgtctttctttatctctgtcttggtctctgtctctctgtaactttatctctgtctctctgtttctatctctgtttttctctgtctgtctctgcctatatctctgtctctctttatctgtctctctgtctctgtgtatctctgtctctctgtaactttatctctgtctttttctgtctctgtgtctgtgtgtctgtctctgtgtctctgtttttctctctctctctctctgcctatttttctctctctgtctctgtcaatgtctctttctggatctgtgtttctttctctctgtctctgtctctccatctctgtctctatctatctgtctctctgtaactcatctctgtctctatttgtgtctgcatgtctctttctgtgtctctgtttctctctctgtttctgtctctttgtttctctgtctctgtgtctttctctctgtctctgtctgtatctctgtgtttctatttctctgtctctctctgtctctgtctctctctttctctgttactctgtttctgtctctgtgtctctgtctctctgtaactcctcatctctgtctctatttgtgtctgcatgtctctttctgtgtctctgtttctctctgtctctgtctctctgtttctctgtctctgtctctgtgtctttgtctctgtctgtatctctgtgtctctatttctctgtctctctttctctctctgtctctgtctctctgtctttctctgttactctgtctctgtctctgtgtgtctctctctgcctctctgtctttctctgttactctgtctctgtctctctctgtctctctctgttactctgtctctgtctctgtgtctctctgtctgtctttctctgttactctgtctctgtctctgtgtctctctctgtctctctgtctttctctgttactctgtctctgtctctgtgtctctctctgtctctctttctctgttactctgtctctgtctctctctgtctctctgtctttctctgttactctgtctctgtctctgtgtctctgtctctctgtctttctctgttactctgtctctgtctctgtgtctctctctgtctctctttctctgttactctgtctctgtctctctctgtctctctgtctttctctgttactctgtctctgtctctgtgtctctgtctctctgtctttctctgttactctgtctctgtctctgtgtctctctctgtctctgtctttctccgttactctgtctctctctctgtctctctgtgactctatctgttactctgtctctgtctctgtgtctctctgtctctctttctctgttactctgtctgtgtctctgtgtctctctctcgtctgtctttctctgttactctgtctctgtctctgtgtctctgtctctctgcactgttttcctggtgaaggagaagccatgtaccttcctgcatgatctgtgctcagctcacaaccaccccatgattgaggacacccctccttctagaaggttcccagctaacaggtgcagaaggagtgaagattgaaataggagaccccatcttgagaccctcccggaacagtgcccctgggccgtgtccccacttcgggacgtgggatctcggtgccaggcgtgcgctgcctgaccccgatcccgtcggcgtgtgggcccttcctcagcccaggtgattccctgtgggcacgggactgggcagtgctccccacggctgctgggccccaggaccggcctccaaggctgaaccgcggctctgccagctccacagacagccagcagcccacccgacagggaccaacatgacaaggtgctcagggccgccctgtgccccgggacccagctgcagcctcagcaggacagggctgggggcggagggcacagccggactcctgaggacaaacggcccgcgccccgggtgaactcagtgccgtgaggagcctgtgcacgggctgtggtggacgcgtccctgagaccctgtgtgtgctgtagcgtggctgtgcccgctgccctcaccacctgctgcccggggcccagcctccctcgctggggctggagggtggatccagcagggacagcgtgatgctcagagtcatcgcatagtgacaaggacgggggctgctttcaaagctcctgaatgttttagtggctcagggtgaaggttcacaggcctcgggggacatggcctagactgggcgtgggtccagccccttggcaggcagtgggtacagggcgtgtcctcctccatccccatctgtctggtccccagccacacgctgagcctgggtccccgactcccccccgacccggcagctcaggcccaagtccctgtcccctccccacatcccctcacagcaggtgcttcagaggggccctggaacgtgaccagtgtgggggaggtgctgcggggactggggaccacacacggcacccggcccagtgccagggggaggcgggtcagggcccaggtctccgaggcccaggctgtgcgtgtcggaagccccattgttgatggagtcagatgcccacatcctcatccccgcctggggccccttctccaggagccctgggttcagtcagagcccagccaaggtcccctccctggccagaggcctcactgtctcggtcaccctaacctcactgcccccacctcctcacccctgccagcctggccactcagggctgctcctggcctccttcccacagacactgacccacaggttctccaggccctccaggaccttctcacactccacagcccctgcccctgtcctgttgacctcccagcgtccatccctgtcctcaggctgcaccctgctggctgtcctgttctctgaccatcccccactgtccagtccctcctgggagacctgaggctgtcctgggcttcagcccccagggctggggtcgcagtgcgcagggtcctggacctcctgctcctgcctctggcatgctgttacccaccccaacctccccagcccgatgttcggggtcccgtgtgtatctgtgggtttccccgaggctcagagtcctgccccggccagcacagacggggaacagggcgagggctgggtggtggcccagtgacctcgggggccaggcctggggtgtgcaggtgggcccgtgctgccgtgccccccacccacagacaggccccgactctggcccagcacccgctccgccgctcccagctgcaggctgagctctgcccatctgtttctgggccatgtgcatgtgtgtttggagcctttcctgagccaggctttgggtgggccctgtttccccaggccaccgatgagcagagcgctgtcagcttaccgaggggacccccgaggcagggtttcgtgggcacacaccagtgagccctggagctggtggggggtgagcgtgtgagggtgggagcgtgtgagcatgggtacaaatgtgacagtgacttagcgtcggggtttgagtgtgggtgggggtgtaagtgtgggtgagggtgtgagtgtggaagtgtgttagtgagtatatgaatgtgagggtgagtgtgagtgagggtgtgagtgtgtataggcgtgtgggttgtgtgtataggaagtgtgcgtgttgtgtgtgtgtataggaggtgtatgtgttgtgagtgtgtgatagttgcatgtgttgtgtgtgtataggtctatgggttgtgtgtgtggtgtatgggttgtgtatgaatgtgtggtgtatgggttgtatgtgtgtataggtatatgtgttgtgtgtttttgtggtacatgagtttgtgtgtgtgtataggtgtatgggttgtgtgtgtggtgtatgggttgtatgtgtgggtggtgtatgcgtgtgtgtatgagtgtttcgtgtatgtgttgtgtgtgtggtgtggtatatgtgtgtgtgagtgtgtggtgtatgggttgtatgtgtgtataggtgtataggttgtgtgtgagtttgtggtatatgggttatgtgtgtgagtgtgtgtacaggcgtatgggttgtgtgtgaatgtgtggtgtatgggttgtgtatgagtgtgtgtaggtgtgtggcttgtttatgagtgtgtatacaggtgtatgggttgtgagtgtgtgggtatggtttgtgtatgtggtctgtgggttgtgtatgagtgtgtggtgtataagttgtgtgtgtatataggtgtacgggttgagtgtgagtttgtggtatatgggttgtatgtgtatataagtgtatgggttgtgtgtgagtgtgtggtgtatgggttgtgtgggggggggtgtacggcttgtttatgagtgtgtgtataggtgtatgggttgtgtgtgtggttatggcttgtgtgtgtttatggtctgtgggttgtgtgtgtgctgtatgagttgtgtgtgtgtgtataggtgtttggttgtgtgtgtttgtggtatatggattgtgtgtgagtttatgtatagatgtatgggttgtgtgtgagtgtgtggtgtatgaattgtgagtgtgagtgtgtataggtgtatgtgttgtgtgtgcagtgtatgggttgtgtgtgtgaatgtgtataggcatatgggctgtgtgtgtgtgtggttatggcttgtgtgtgtttgtggtctatgggttgtgtgtgtggtgtatgagtttgtgtgtgtggtgtatgggttgtgtgtgtggcatatgggtgtgtgtataggtgtatcatttgtgtgtgagcgtgtggtatatgggctgtgtgtgagtgtgtggtatatgggtgtgtgagtgtgtataaatgtatgggtttgtgtggtatatagattgtgaatgtgtctgtggtgtatgggttgtgtgtggtgtatgggttgtgtgattgtgtataggtgtatgggttgtgtgtgagtgtggtatatagtttgtgtgagtgtgtggcataaagtttgtgagagtgtggtatatgggttgtgtgtggtatatggctgtgagagtgtatataggtgtatggtctgtgtgtgagtgtgtagcatatagtttgtgggtgtatgtggtgtagttgtgtgaatgtgtggtgtatgggcgtgtgagtgtgtataggtatatgggctgtgtgagagtgtggtatatgggttgtgtgtgtgtgctctatgagtgtgtgtaagtgtatgctctgtgtgtgtatggggggtgtgtgtgtgtatatataggggtaggggttgtgagtgttttgtgtatgggtgtgtatgtatgtacacggggtgtgtgtgtgggacatgggtgtgtgtgtatatgtgtatgtgttatatatgtgagtgtggtatatatagtgtggtgtgtatatagtgtatgcgctgtgtgtggtgtatgtgtgtgtgtgtatatatgtatgggttgtgtgtgtggtatgtgttgtatgtgggaaataggtgtgtgagtgtatatgtgcgcgcgctgtgtgtgtgtgtgttatatatgtgtgtgtatatgtgtatgggttatgtgtgagtgtgtgctacatagtttgtggtgtgagtgtgtactgtatgggctgtgtgtgtggtgtgtgggtgtgtgcgtataggtgtatgggttgtgtgtgtgtggtgtatgggttgtatgtggtatatgggtgtgagtgtgtataggtgtatgggttgtgtgagtgtgtataggtgtatgggttgtgtgtgagtgtctgatgtatgggttgtgtgtatgtggtatatgggtatgtgagtgtgtggtatatagtttgtgagtgtgagtgtgtggtgtatgagctgtgtgtgtgtggtatatgggtgtgtgagtgtatataggtgtatggttggtgtgtgactgtgtggtacatagtttgtgagtgtgagtgtgtggtgtatgggttgtgcgtgtttggtatatgggtgtgtgagtgtgtggtatatagtttgtgagtgtgagtgtgtggtgtatgagttgtgtaggtgtgtggtgtatgggttgggtgggagtgtgtgggacgtgactggataagttcgtgagtgtgagtgtgtggctgtgggtgtctgtgtgtctctgggtgtgtgtggatgggggtatgtgggtgtgagtgtgtgtgtgaggtgtgggtgtgggggtgcactgcgtgtcctccctgggggtggcccctgagagtcggggcctgagcccggatgtctccgtgactctgcatgtctccctctgcctccgtctctctgctttgtgtctgtctctgtcatccctgcctcgctggaaaggtgactggataagttcgtgagtgtgagtgtgtggctgtgggtgtctgtgtgtctctgggtgtgtgtggatgggggtatgtgggtgtgagtgtgtgtgtgaggtgtgggtgtgggggtgcactgcgtgtcctccctgggggtggcccctgagagtcggggcctgagcccggatgtctccgtgactctgcatgtctccctctgcctccgtctctctgctttgtgtctgtctctgtcatccctgcctctgccccatccctctgggtcctagaatctgtccaagtctggggccgcctcccaggaagccccacaagtgtccaccaagggatgcacggaggacaaactgcagtgcacacatacgaggaggctgagtcaccagagcctccacgctagtcctgccccgactccccgggtcagggctccaggccccaagcgccgcccggctcccccctgggctggggcctgtatggggctgggagtctggaggctcagccctgcgggggaggtgtgagcaaacccgcctgcactgcgaaccaagcacaggccatcccctgacactcagacacgcagagacgtgcacagacacatacacatacgcacagacacacagacatgcacacacagaaacgcacagacacacagacatgcacacacagaaacgcacagacacacacagacatgcacagagacacacacacagagtcatgcacagacatgcacagacacacacacacacagacacacagacatgcacagagacacacacgcacagaaatgcacagacacacacggacatgcacagacacacacatatgtgcacagagacacacatatagacacacatccacatggatgcacagacacacagagacacacacaggcaaacacatacacacacagacacataaagacacagacacacggatatgcacacacacatacagacacacatgcacgtggatgcacagacacacaccgacacacatagagacacacacacacacagacacataaagacacacacagacatgcccgcacacaggcaccccctcccgcaggtcacgcttgcagcccctggccactgtcctgccccgtgtcatgaacctgcctcccctgttgctccacgccaggacattgctgcctgaccacagcctggaccacctgctcagccctatcagtgcggacaaaggccttgtcctggcggtgacaatgagccaggcccactgcacacttgtccacaccacacacctgtccaccccacacacctgtccaccccacacacctgtccaccccacacacctgtccacactacacacccgtccgcatcacgcacaaccgcacacctccagctcatccaccactcactgcacacacgcttgcatctcacacgctcatgctcacactcatgcactaacacacacattctcccacctgttgccaagctcacacacgtgcacacatggcgttgctgggccaggctttggcacatggggtcagggaaggctcggagagcgtacgccttggcctctctggcggcatgtccgggtctgcggggcagaggtcacagttgctgccccacgacaccgcatgtgcccctgcagggcctgggaatggcaccccgcagagcccgcactcagggccagctcgtgtcagcaccgcgtggaccacgtcccgaggacacctgggccagccagtgctgcgggctgcagcgagtgtgtgtgcacacgcatgcccatatacgtgttgtgtgtgcttgtgtgcatgggagggggtccctgggtgggccagggtctgcctcgggggctggagtgggaggcctgggcccctcagctttcctccaacccagcctcacttccccgcccctctcacctctgcgtggccaccagccagccctgggcttggccccggcatgaggcctgaggcagggccctggataacgctcaggacgggcacctgggccttctgggcctcctcgccaaggaccagactcggcctcagcgcctcacactcatcgggggtcatgccctggggcccagccaggaccctcgctgccccactcaggaggctggacacactagcaggtgggggggccgcagctccccctcccccacccccgtccagtctgaaaaacaagacctcatgggcaccgggccgcagctcccacccccaccccaccacacaggcacaaacacattcttgcaaatatttctaaaaatgctgaaaatgggaaccacagagcaggtgggacagtggtgtggaaacccccacccacctccgagatggcgatttgcattgggggaggtggggggaaggctggcacccaggcagctggtttgcaggattcctgactattcacactccccagccacaccccatgtccaggccaatgctgtggccaggcccagagtgaccaggccccagggcacttcccagaggactgcctggtggagggggtaacaagtcggaccttgccccaggggagctgggccagggaggagacccctgcatggaggtcccaggcatggcccccaggaacaggacccccagcaccctcggaagaggattttgtgggtcacctggggacagagcttcctccgtgcacctgctgggcccctcacagcccacctgtcaccaaacctctgtcctcccctgtgcccaggcctggccaacccaggcgctttcagcccgtagaccctaggtggggtcgcccaaccctaccccggcctcaggaccctctggggttgccccacgagaccaccccagaacagacctgcccaaccccagccctgcatcttcagtgggacacagaggcctccataggaccccaccccacacccaggggctgtccggggcccatcaccccagcagctgagaccctgggagatgacaccctgtgcctagaacagggtggaccacatggggggacattgtgacccgtgtcccagccaggcaggacagccccaccccagcctcctagaggaggggtctgtgcctgcgcccaccccctcagtggaacctaagccctccagggaggactcaagtttgaggaaaggatccctgggaagacccccagggtgcagcccgggtgacagggctcagggggcccttcctgcacatacagcctcccacaaatatagtcatgcacaccccacagagacacacagaacacacaaacacacagagacacagacacatagacagacttagagacataaagacacacaatacacacagacacactaacacacacacagacacctagacacacatacagagacagacacacacaaacacacagaaacacaagcacacataccacacacacacgacacacagatacacatagacacacacagagacagagacacacacagacacagagacacacaaacacagatatacctcacacacacacacacggacacacatacaaagacagagacacacacaaacacacagacacacaagcacagacacactaccacacacatacaggcacacagacacatagacacatatacagagacagagacacacacagacacagaaacacaagcacagacacactaccacacacacagagacacacagacacacataggcacacacagagtcagagacacacagacacagaaacacaagcacagacacactaccacacacagacacgcataggcacacacagagacagagacacacgcagacacaggtacacaagcacagacacgctaccacacgcagagacacacacagagatagatacagacacacataaagtcagaggcacacacagacacatacagacacacagaggtacacggcacagacacacacactcagaggctcacactcagccacagccacgtgcacacagctcacacggcccacactcaggtccacaagggctcacagcgtcacagaggcccccagtcccacagccagacaagcacaggccgtgctcacgctcacacactgacgcacacattctcccacccgctgccaagctcacgctcacacatgcacacgtggcattgctgggccaggctttggcacatggggtcagggaaggctcagagagtgagcatcacagacacagggtgggactggtgtccggggggtccatgagcagccgaggggcagccctgccacgcccacaggccccaggtctattctcaggcacccgcctggggctgggggcttccttctgggaactcgaggacctccgttctgcacggagacacacgtccagaaagggacaccccagggccacacccagacacacccagcccgactcgggcacccagcacacgccaggcacacaacaaacacaggagctggcacacgcctggccccaggccaggacagcagcaggcaactcggccagtgcacacagccgctcacacacaccacacatccccacaagccctcacaccctcacatccccacacaccctcacagatcctcacactcccacacatccacacacatcctcaaacaccccacacatccacacacaccccacacaccccacacatccacacacaccctcacatccccacaccctcacacaccccacaccccacacacccccacacatccacacacaccctcacatccccacacacccccacacatccacacacaccccacaccccacacacaccctcacaccctcacacatcctcacactcccacacatccacacacaccctcacatccccacacatccacacacaccccacacacccacacacaccctcacatccccacaccctcacatatcctcacactcccacacatccccacacatccccacaccccacatccacacacatccacacacatcctcacacacatacacacaccctcacacaccacacacccactccctcacacaccctcacacaccccacacatccacacaccctcacactctcacaccttcacacatccacacacaccccacaccccacacgtgcacacacaccctcacatccccacacatccacacacaccccacaccccacacaccccacacatcctcacatccacacacaccccacacaccaaacacaccctcacacatcctcacactcccacacatccacacacaccccacaccccacacatccacacacaccctcacatccacacacatgcacacacaccccacacatcccacacatccacacacaccctcacaccctcacactccctcacacccccacactctcacacccccccactctcacaccctcactcacacactctcacacaccctcacaccctcacagtctgaaaacttcacacaccctcacaccctcacacacccacacaccctcacacaccgtcacacactccacacataccctcacacactctctcacacacacccttacaccctcactctcacacacccacacactctcacacaccctcacacatacacacccttgacagcttgcctgcagtctgtcagaggggtccctcagagggccaccacgccctgcggatcaggtgcccagaatccaccatccagcggctctgggcctttcccctctcagctcatgacctttgggtaccacggctcaggggtacccctgtgctccccagctgccaatccctgcatctccttgggcccctgctgacctctccagtggcctcagggtgacgtcctggccaggccctgtccctctgcagccacctctgcccactgccccaccacctgcccagggctcccccaggctcccacaccagccgtgggggtctctcaggcaggccggccaggtggcaccacggctcccccaagggcagcaggtcaggcgtgagcattgccgtctcccatcccctcctgctgagcccccacaggagcctggcagcccgatcctgtcgccatagtgagggcagctcctggcccaccaggcccagtccacaccagccggccgcaggcagcgtgtctgggagacaccccaggccgcccaccgcccagcaggggacaagccagcccccagacccgtgccctgcacagggggacggggctcagacccaggctgcccttgacagcaggagctgtggtgggcccacggtggggaccactggggacaggcctgggggcacacaatgctcctgaggggcctcaggctgcgtcctgggttggggcactgttctgtgagtaggtgacatgtcaccttgaaagggcttctatttcactaagagaaaaggtggaggctttcctgggggagggcggtgcggtgttgtgtgggacagtgagagagggaccaccagcacagacaaaggagaggaaagtgcagggggggtgggggctgcagggacagaggcttggggaggcgctggaaccgcagggcgcgggcctggggggcccacacgccacctcgagggaccgcacctggggaccacagacgcaggcccactcgggctctggagggccctcctggggctgcctggccacgctctctctctcctggtcccagatcccctccacggcccctccccacccgtccatccagaggttgcccagggctggtcagaaggggtcacatgacacccccaggaccggctggaagtggagggatcgtggtcccgcaattcaactcccacccggcactccccactcaacatcacttaggacagttatattgtttcgggttttttttttcttctgtattaaaagcattaacttccaatactgcttttataaaacacacatgcactgtggtgaggacgttttgttaaaatgaaagggacaagccggggctggacggggaagccccctggtggggggacacgggaggggcaccctgcactcacagaaaagcccctccattctttgcacgtttcaaatgttgtattttcaaatataattaagcgacgtgggaggaagggcaccgcgtgctaggcaggagcagccccctcctgggagggagatggcagacaggggacagggtgggggacagggtgggggacagggtgggggacagtgaccaggtgaggaaagatgcgggtcagggactgggggtgcaaatggggaggtggtgggagacgaagcccctccaaacctgacgccccgccgcttcccgagcccggggttcagggcttcctgttttcctgtgtgattatgagctcctgctcctgccctcgccccacgcgcgagtctcccctggaaggatgtgcaagcttttcacaagcaccacagactcttacaacccgggaccacctgggaccccaggcggtcaggaccagggccaccccacacggcaggcaccagcgctcctgacctgggctgcagaacagcctgtggtcaggcaggggctcccactggcccctgtcctcggcaggcccttccccaggagcagcgtccgggagctcaagacaggcttgggggctgcccgtccacctggggaggatctttgcagggccctttctttctcactaaacagcttgcctgtagaaaggagaattcgaagggatttaaatccagtatttttactggttttccccggggctagccagggtgtctgccccacctgctggtggaaacgaagttcccactctggccttctccgttagggctttatttcatggaggttgcatatgcccgcctccctgcaatgcgatggtgaggccagggactggggatggggcaaggcctggaagggtgtgactgtctgtgaggtggggatgggcctgcagagggacgtccgggaatacacggaggcgtctcgcaccgacaccggggttcactgtgacgggaggggctagagaccatctgagtgggctggaatgggggttgtcgcacacccctcgggggtggatgtgggtgcccagcaagagaagcagacccggccccacaggaggctgcagatggaagcttcagaggcggctccggggctgccacaaaccccgcccctccacgtgcctccctgtcccgggagccgcccctctgacccccaggcccttccccggacgtcccagctgctccacagcccaggcttctcccctcctgcccccatggaacccccaccctgggctgtctgggcctgcctagccggccgtgtggggtcccccaggcccgtggcccaagcacccatctccgtgtccagcgcccagcgcactcggacgtttcacacgcgggcctctggggaggacccccaggcaccgccagcccaaccccggcggccggaaactggacccgctgcggcagccgctgaggctctgctgcccccgtgtggccgacagcagcatcgaacgccgccgaccacgcggcgcttcccgggctcggggcaggggcaggggcaggggcacgggcaggggcaggggcaggggcaggggcaggggcagggccagggccaggggcagggccaggcgtgctctcggggccggatcccggctctgccttgggctcagggctggggcccggtccgtgtccagcactgtgatcccctcccctccccagcgcctgccgcggaggtggctgtggcatccgcgaacaggcatcagcttgtggggctctgtggtctgggatcccagcctctgccaaagtcctgcattccctgggtgtggggacgctgtgacctggggacgctgtggcctgggggccttgcaaggctgcacctggggcagatggggaagctggcctgggctcctcggtggggccccgcgccccccacttctgccggcagcatccgatgctccctgaccctggtcaggacccttcctcctggcgtggcccagtgtccccgcggaagccccagaacgcggcctgcccgggagccggctcgggcctggggcctgcgggtcttcactatggtcgcgaatggacccacgggatgctgcatgaggcgcacgagcttgaggcaccagcctccggccactgtccctggaggacaagggacgcggctccggagcagagggtcctcccctggggatgccctcccggcggctgggtgtggggctgggggctgtgcccggaagtgggtgggtgggagaagccctcctgagcacagaggacagcagccaggcccaggcccaggccctgcaggcccccaggggctccagagccccagagaggaggaaggcctccgtgtgctcagaatcagctcacaccccggggacgaacctcagagggccgggacaaggaaaggaaggccccggcccaacatcggggtctgggcgctggtgggacagggcaggctcagccttggggccggtcagggccctgttggggttcgggtccccctgccaggtccgcgtctgcagccacagcccctcaaccccagcagggaccccagagaccggctcgggaccccctggtggccgtcttgtgccactgcagttctgctgctgagaggttcccggggttcccggggttcccggggtccctggcccggcagcctcctgggctcccaggcaggcgcgctctgccgtccgctcatgcggggacagcggacctcagaggcaagcctaaaagacgcgcccagatcaggatcccaggaacccagctcacatacaaatcagaaaagccctaaagaagcagaaacaagaatcagtgaaacaagaaactatagaataagaacccaaacaaaagcaaaatgtcggcgttatcagacatagaatatgcaatgtgtgcttcagagggtttttttgtttgttttgttttgagatggagtctcgctctgtcgcccaggctggagtacagtggtgcgatctcggctcactgcaacctccgcctcccgagttcaagcgattctcctgcctcagcctcctgaatagctgggactacaggtgcccgccaccacgcccgactaatttttttggatttttagtagacacggggtttcaccgtgttagccaggatggtctcgatctcctgacctcatgatcttcctgcctcagcctcccaaagtactgggattacagcgtggccaccacgctcggccaagagattttttaaacttacttacagaagctattcaaatattactgcaaaatgggaaattactgcacattgcattttgaaatgacctgagagttttacgaagaacttctagaattgaaaaccgtaatagatgaggctaaaataagaatggatgggacaggcagcgcagaggacacgcaggagcgggagctggtaacaccgaagaaagagcaggagacgccacccagcccgagcgcagccccgcggaggctggacggaggctcccacaagggcttcttctgcccaaaggagaaacagagtcgggggaggcagtggctgggaattttccaaaatcgctgaataacaggacgcgtcaggatcaaggccaagtcccaagcaggataaataaaagcaaactccacgtccacaccttgacgcttgccgatggagctgccaacaccagaggcaaagagactttagaagcatccaaaaggaggccgggcgtggtggctcacatctgtaatcccagcacttttcgaggcagaggtgggtgggtcacctgaggtcaggagttggagagaccagccaggccaacatggtgaaacccggtctctattaaaaacacaaaaattagctggacgtggtggcgggtgtctgtggtcccagctactcgggaggctgaggcaggagaatcgcttgagcccgggaggcggaggttgcagtgagctgccatcgcgccactaccctccagcctgggagacagagtgagactctatcaaaaaaaaaaaaaaaatccgtcagggccggcccaggcaggtgcactcgcgcggccacagactccagagccggactcgggagccccccggcggccgtcccgtgccactgcacgttctcatagacaggagagtctcaagaaccctggagcaaacaagacgcctggagcagcctcccagcatctactcacctctgccggccgtttacacccgaaagccacccctcaagaccaggacaacggtgacactttcatacaaagggcacaggcacttaactccgcacgctggctgctggcgcctcctaagagtgtgtttagaaatgttaaagaaaaaattattccatgatagttgttcaatgcggaggcaggtgtgattcaggaccaccgccgcaggagcagggaccacggccatgcgggagagagatggggctcagttcttaacacagcatgggctggcggggattgacagccagggagctgggtaaactcggaggacggacattcccaagaggaaatattggggggaaggagggttctggctaaattagcccaggaagatttttgctgaagacagaccagggtgatcagacctgggagatggtggaagatgaggaactcaggatcaagggtgatcaaatgtcaagagtgggtctttaacctgatttaggggggttctttttttttctttttttttttttttttgagacgtagtctcactctgtcaccaggcagtggcacgtgtcatcgtgcagtggcacgatcttggctcactgcaacctctgcctcctgggttcaagcaattctcctgcctcagcctcccgagtagctgggattataggcgcgtgccaccacacccagctaattttcgtatttttagtagagacagggtttcaccatgttggccaggctggtctggaactcctgacctcagatgatcagcccacctcagcctcccagagtgctgggattacaggcatgagccaccgctccgggccccaccgggtactttttaaagcctttttcttacaaggaagtgcaggccggcctaggagaagtttccagagcccgactgcagtttagccaagcagagaatctttgtcagtccacactgtttaaggaaagaggagacattctcgtttccctccaacaatataagtccattttcttgttgggtggcctttcgttcattaagaaccagctggattttctgttgggactggatagaagaggacatttcgccgcatggtgctagcagttggacattcgaagaggagagactctgaaaataaatgaaacacaaaggttaacacttagaaatgcagtttctgagcccagtgggcaccaggccagaagatttctagacgctgggcctgaagcatcttcagctgcagccaggtaggcagctgaagggccttcctgatttgcaggtcaggtgttgcagaagctgcccgcacaggatctgtggggatgatttctctgaagtttacatcaacttgtcccatttcagctcacagggcttcaggaaaagggcagttttaaatttgactgattccaagtcagagggtgagggaaaaattagtttgcagagttgttgcctgatattagagaaaactagaagaattctgaaggggccagcccctccacacctgtgggtatttctcatcaggtaggacgagagactgagaaaagaaataagacacagagacaaagtatagagaaagcacagtgggcccaggaaaccggcgctcagcatacagaggacctgcaccggcaccggcctctgagttccctcagtatttattaattactattttcactatctcagcaagaggaatgcggcaggagaacagggtgacagtggggagaaggtcagcaagaaaacgtgagcaaaggaatctgtgtcacaaataagttcaagggaaggtactatgcctggacatgcacataggacagatttatgtttctctccacccaaacatttcagtggagtaaagaataacaaggcagcattgctgccagcatgtctcgtctcccaccacagggtggtttttctcctatctcagaatagaataaatgtacaatcgggttttataccgagacattccgttcccaggggcaggcaggagacagaggccttcctctatctcaactgcaagaggccttcctcttttaccaatccacctcagcacagacccttcacgggtgtcgggctgggggacggttaggtctttctcatcccacgaggccatatttcagactgtcacatggggagaaaccgtggacaatacccggctttccagggcagaggtccctgcggctttccgcagtgtattgtgcccctggttcatcgagactggagaatggcgatgacttttaccaagcatactgcctgtgaacactttgttaacaaggcacgtcctgcacagccctagatccctgaaaccttgattccatacagcacaggtttctgtgagctccaggttggggcaaagtggctggggcagagttacagattaacacctcagggcaaagcagttgttcagggtacaggtcaaaatggagtttcttatgtgttccttttctacatagacacagtaacagtttgatctctctttcttttccctacatagccccctttccttttgacaaaaccgccatcgtcattatggccccttctcgctggtcgctgtctcttcagagctgcgggatatacctgtagactttgtttttttcaggcttttcttagctaactgtgtcagctcctgtatttggccccaggtcagtggctttgcttccttggtggatggcaacttcttctgtaagttgtagatactaaattggaagctggttttttcctggggaaatacaagcaaaacttctcccccatgttatcaccttccctatttcccatgtcttgtttttgttgtctttccaccacatcagttttccttcatgtgggctgctctttttgccagtaaaatgttgttctgcagaagtagtggtctgatttctataaatgtttaaacaatttaaagtatagattgctaggttaagttgcatctggggagcgttatactcctgtctttttcttctttttgtttcaccagttgagattttgagtgttctattagttctttcaattatggcctgtccttgggaattatacaggattcctgttgtatgtgtaattttccactgatttaagaatttttgaaatgttttactacagtatcctggcccattatctaattttttctggaactcccatgacagcaaaacaagacaataaatgtcttttaacatgggaagtactttctcctgtctggcaggttgcccatacaaaatgtgaataagtatcaactgtcacatggacaaatgataattttccaaatgaaggtacaggtgtgacatccgtttgccataacgcattaggacatagacctctgggattaacttctgcctcctgagtgggcaggtgtaggacttgacactaggtgcaatgctgtacaatattttttgcctgtttccatgtgataccaaatttattttttagtcctgttgcatttacatgagttgaggcatgaagttcttgtgcttccatgaaggcagatgacactagcaagtcagcttgttcatttgctttagttaaaggccctggtaaattagtatgcgctcgaattgagtaatataaaatgggaaatttctttttctcacagtttgttgtaacaaattaaacagctggtttaactgatcatccatgctatatttaattagggctgtctcaacatcctttgtaccctgtactacatatgcagaatctgatacaatgctaataggctgattaaaatcttataacactgaaatgacagcaaccaactctgctctttgagctgagtgatattgagtttcagtgactcgttcttttggcccagtgtaagccacttttccattgctagaaccatcagtaaacaccgtcagagcatttttttaaaggtttctgtctggtaattttaggtaaaatccaagtagtcaattttaaaaactggaagattttcgttttggggtaatgattatcaataattcccacaaaatcagcaagacccatctgccatgcaccagaatttataaaggcttgtctaacctgttccttgtttacaggaacaatgattttatctgggtcaattccacacaattttattattcgtaattttgcctgactaattaatgtagccgtttgatccaagtgcaatgtaaaagtcttaatcgtactgtgaggaaggaaggaccactccacaagatctgtgttttgaacaatgatgcctgttggagaatgtgcagtagcaaaaatcaaaagtcggagtggggctaagtggtctattctatttacttgtgctggctgaattttttcttcaactaattcaatttctttcgtggcctctggagttaatgttcttttactattcgattctggatccccgctcaagatagagaacaaatttgacatggcattaagtctacaagtttgtgtcctatcctgaggtcgcagggtgctccactgagtgaggactgcccgccccacccagaggtgtcggttacttcaccatggcagttgtggcccctgctgctgcacatgccgccccagggggcactgcctcaggaaagccaggcacacccaagggtgcaggaatggcaggccctggcggtttggcgcgcaacagccggaacaagtacatgcgctcgggcctctgttccaccttcaccatccagtctctgcagccgcagccaccccctcagcctcggcctgcagcggtgctccccaacgcagctcctgcagtccaagcccctgggaggcctgcctggaggctgaggaagccggcttccctctgcaggtcatcctgaccccgcccgaggccccaaacccgaaactggaagagccgaatgtggagccgggcttgcgccgccctttgcccccggaagtggaagtggaagggcccgaggaagagctggaattcgcgggggagagagggttcgtgccagaaaccgccaaggccgagcctgaagtccctccacaggagggcgtgccagcgtggctgccgaggtccttatggacaccgcagggcaggcgggcggccacgcggcttccagccctcagatctcccagccgcagaagggccggaagccccgggacctagagcttccactcagcccgagcctgctaggtgcgccgggacccgaacggaccccaggatcgggaactggctccggcctccaggcgccgaggccggcgctgaccctgtccctgcttcctacgcacacgttgaccccggcgctgctgacacccagctcgctgcctcccagcgttcacttccggagcagcctgagtcccgctgcgccccgcagcccggccaagctctcctgccagcttccgtccagtggcggcgcccaggtgcacatcccttccatcggcgtggctggcctctcgacccccgcggtgctctcgccagggccgcagaggccatgaccaccaccagcaccaccaccccttctggggtccctccatccgtgctctctcaaggagaaacacagttcaactgaaagactcatgctctgattgtggtggggtggggatccttgggaaggatttctcccaggagtgactctcattaactcctccacagaaaacactcagcttccacagcttctctcttttctctcttttctgtccgtcccccagtggctgccctgacacgtctcctacttcaatggtaggggcggtttatttatttattttttgaaggccactgggaagcgcctgacctaacctattagggtggtcaggacgtctcccccacctccccgcttttttccccaagacaggacaatcggggtctgacttgagaacgacctttctttcttcattcctcggcctgcccgtggggagatgagggagccctgtgtccattttaggatgtgagtagaagttagtttcgttttattattcctggccatactcggggtccaggaagaatttgtaccatttaatgggttgggagtcttggccaaggcagaatcacacccttggaatagaaatttccacctccccaacctttctctcagacagcttatccttttttaaccaactttttggccagggaggaatgtccctttgttcttcttccccctgagaagccattcctttgtctgccaaactccctggggtcctgcctgtttcctcccatggaggggttttgtgggggtggttcctgtctgggggggcccctccagccagtactccaggtctccctgtctctcccgtgctgccattttgatagtataatctatttttaaatggggcttttcaataggggagagggagtcatctcttcctatatttggtggggtgggtgtgaagaaagggatttgggagggaatcttcctgccgcctcccccccagatgtttatttttgataacaaatgtgtattttcagttccctccctcccagccccccaatttcctacaggtaggtacaaaggacactttcaatgtccctggaggtgggagggaggaatgggggacataaagcctgtcctgtctctattctaggcaggaagagtgggttcaaaagactcctgggcttccctgtcagccctggcccagcccaggccttgggacctgggggttggtgatttgggggacggtgctacactcgtctccactgttttgcttccccaaaatggaccttttttttttctaaagagtcccagagaatggggaattgttcctgtaaatatatatttttcaaggtgaaaaaaaaaaaagaaaaacctgccataatgaagagcagaccaatattccagaaaactgtcactttaacagagaagaccaaattctagtttcacatgaactgttaatattaaagctaattttaattaaaccttataaataattccatccaggctgggcaaggtggcttacacctgtagtcccagcattccaggagggtggatcacttaagcccaggagtttgagatcagcctgggcaacatggggaagccctgtctctacaaaaaatacaaaaaaaaaattggccaggcatggtggcacgtgcccgtagtcccagctacttgggaggctgaggtgggaggattgcttgagccctcccacctcaacctccctcagcctcagtgctgagtgccactgcactgctgcctaggcaacacagtgggaccctgtctcaaaaataaataaataaataaatccggccaggtgcagtggctcatgcctgtaatcccaacactttgggaggcctaggcgggtggatcatgaggtcaggagttcgagaccagcctggccaacgtggtgaaacccctgtctctactaaaactataaaaattagctgggcgtggtggtgggcacctgtaatcccagctactctggaggctgaggcaggagaatcgcttgaacccaagaggcagaggttgcagtgaaccgagatcacaccattgcactccagcttaggcaacaagagtgaaactctgtctcaaaaaaataaataaataaatccaatcacagccgcctttgaccacataagatcccttttccacaatccttttacaactttttatttgtttgttttttgttttgttttgttttttgtttttgtttttgttttttttgagacaaagcactgacctggctgccgagccccgccccctaggctgcaggggtgcctgcagaagggcaccacagggccaccagtcctgcaagctttctggggcaggccgggcctgactttggctttggggcagggagggggctaaggtgaggcaggtggcaccagccaggtgcacactcaatgcccgtgagcccagacactggaccctgcctggaccctcgcggatagacaagaaccgaggggcctctgcaccctgggcccagctctgtcccacaccgcggtcacatggcaccacctctcttgcagcctccaccaagggcccatcggtcttccccctggtgccctcctccaggagcgtctctgagggcacagcggccctgggctgcctggtcaaggactacttccccgaaccggtgacggtgtcgtggaactcaggggccctgaccagaagcgtgcacaccttcccggctgtcctacagtcctcaggactctactccctcagcagcgtggtgaccgtgccctccagcagcttgggcacccagacctacacctgcaacgtagatcacaagcccagcaacaccaaggtggacaagacagttggtgagaggccagcacagggagggagggtgtctgctggaagccaggctcagccctcttgcctggacgtaccccggctgtgcagccccagtccagggcagcaaggcaggccccatctgtctcctcacccggaggcctctgcccgccccactcatgctcagggagagggtcttctggctttttccaccaggctccaggcagccacaggctggaagcccctaccccaggccctgcgcacaaaggggcaggtgctgcacttagactggccaagagccatatccgggaagaccctgcccctgacctaagcccaccccaaaggccaagatctccactccctcagctcagacacctctcctcccagatctgagtaactcccaatcttctctctgcagagcccaaaaccccatgttgtgacacaactcacacatgcccaccatgtgcaagtaagccagcccaggcctcgccctccagctcaaggcgggacaggtgccctagagtagcctgcgtccagggacaggccccaaccgggtgctgacacgtccgcctccatctcttcctcagcaactgaacccctggggggaccgtcagtcttcctcttccccccaaaacccaaggataccctcatgatctcccggacccctgaggtcacgtgcgtggtggtggacgtgagccacgaagaccctgaggtcaagttcaactggtacgtggacggcgtggaggtgcataatgccaagacaaagccgtgggaggagcagtacaacagcacgtaccatgtggtcagcgtcctcaccgtcgtgcaccagaactggctgaacggcaaggagtacaagtgcaaggtctccaacaaaggcctcccagcccccatcgagaaaaccatctccaaaaccaaaggtgggacccacggagcgcgaaggccacgtggacagaggccggcttggcccaccctctgccctgggagtgaccgctgtaccaacctctgtccctacagggcagccccgagaaccacaggtgtacaccctgcccccatcccagaagatgaccaagaaccaggtcaccctgacctgcctggtcaaaggcttctaccccagcgacatcgccgtggagtgggagagcaatgggcagccggagaacaactacaagaccacgcctcccatgctggactccaacggctccttcttcctctatagcaagctcaccgtggacaagagcaggtggcagcaggggaacgtcttctcatgctccgtgatgcatgagggtctgcagaaccactacacgcagaagagcctctccctgtccccggggtaaatgagtgcgacggccggcaagcccccgctccccgggctctcgcggtcgcacgaggatgcttggcacgtaccccgtctacatacttcccaggcacccagcatggaaataaagcacccaccactgccctgggcccctgcgagactgtgatggttctttccacgggtcaggccgagtctgaggcctgagtggcatgagggaggcagagcgggtcccactgtccccacactggcccaggctgtgcaggtgtgcctgggccgcctagggtggggctcagccaggggctgccctcggcagggtgggggatttgccagcgtggccctccctccagcagcacctgccctgggctgagccacgagaagccctaggagcccctggggacagacacacagcccctgcctctgtaggagactgtcctgttctgtgagcgccctgtcctccgaccccccatgcccactcgggggcatgcctagtccatgtgcgtagggacaggccctccctcacccatctacccccacggcactaacccctggcagccctgcccagcctcgcacccgcatggggacacaaccgactccggggacatgcactctcgggccctatggagggactggtccagatgcccacacacacactcagcccagacccgttcaacaaaccccgcactgaggttggccggccacacggccaccacacacacacgtgcacgcctcacacacggagcctcacccgggcgaactgcacagcacccagaccagagcaaggtcctcgcacacgtgaacactcctcggacacaggcccctacaagccccatgcggcacctcaaggcccacgagcctctcggcagcttctccacttgctgaccagctcagacaaacccagtcctcctctcacaaagtgcccctgcagccgccacacacacacaggggatcacacaccacgtcacgtccctggccctggcccacttcccaatacagcccttccctgctcctggggtcacatgaggggtgggcttcatatctcctgccctctggggctcagggagggacacgggagacggggagcgggtcctgctgagggccaggtcgctatttagggccgggtgtctggctgagccccagggccaaagccggtgcccaggatggacagcttccgggagctgacctcaggacactgttgggccatcgaggccgggccctacatcctaggccccgccacagagggaatcacccccagaggcccaagcccagggggacacagcactgaccacccccttcctgtccagagctgcaactggaggagagctgtgcggaggcgcaggacggggagctggacgggctgtggacgaccatcaccatcttcatcacactcttcctgctaagcgtgtgctacagtgccaccgtcaccttcttcaaggtcggccgcacgttgtccccagctgtccttgacattgcccccatgctgtcacacactgtccctgacactgtccccaggctgtccccacctgtccctgacgctgtcccccacgctctcacaaactgtccctcactctgtacccacctgtccaacagtgtcccccagactgtctccacatgtccctgacactatccccaacgctgtcgccacctgtccctgacactccccaacgctgtacccacctgtccaacagtgtcccccagactgtctccacatgtgcctgacactatccccaatgctgcacccacctgtccctgacactgtcccccacactgtcacaaactgtccctgacactgtcccccacacgttccctgtccctgacactgtcccctgtgctgtcacaaactgtcactgacagtgtcccccacactatccccacctgtccctgacgctgtcccccacactatccccacctgtccctgacgctgtcccccacactatccccacctgtcccggacactattccccacactgtccccaccagtccccaacactgtaccccatgctatccccacctgtccccaacactgtcccccacagtcccctcctgtccctgaatgtcccccatgctgtttcctcctgtcccctcctgtcccgacactgtcccctacactgtcttctcgtctcctcctatccctgacactgtcccccacgctgtcccctcctgtccccaacaatgtcccccacagtttcctcctgtacctcacactgtcccccatgctgtcttctcctgtctcctcctgtccctgacactgtcccccacgctgtcaccacctgtccccgacactgtcccccatactgtccccacctgtccccgacactgtcccccacgctgtcccctcctgtccccaacactgtccccatgctgtctcctcctgtctctgacactgtcccccactctgtcccctacagtccctgacactgtccccatgctttcccctcctgtatgcaacactgtcccccatgctgtctcctcctgtccctgacactgtcccccatgctgtccccacctgtcccactgtcccacatgctgtccccacctgtccctgacactgtccccgacactgtctctcatgctgtccccacccatctccgacactgtaccccatgctgtccccacctgtccttgacactgtcccccatgctgtccccacctgtccctgatgctgtcccccacactgtccccatctgtccctgacactctccccaatgctgtccccacctgtccctgacactgtcccccacgctgttcccacctgtccccgacactgtcccccacactgtccccacctgtcccaacaatgtcctcacactgtccccacctgtcccgacactgtccatgctgtccgcacctctccctgacactgtcccccatgctgtccccacctctccctgacgctgtcccccacactgtcccctctccctgacactgtcccccacactgtccccacctttccctgacactgtcccccacgctgtccccacctccccctgacactgtcccctacactgttcccacctctccctaacactgtcccccacgctgtcccctcctgtccccaacactttcccccacgctgtccccaccagtccccaacactgtacaccatgctttccccacctgtccccaacactgtcccccacactgtcccctcctgtccccaaaaatgtcccccacactgtttcctcctgtccccaacactgtccaccactctgtctcctcctgtccctgacactgtcccccactctgtccccacctgtccccaacactatcccccacactgtctccacctgtccctgacgctgtcttctgtactgcccacatgctgttggtgccctggctctgctctccatgtccaggcctcagagcaggcagtggtgaggccctggcacctgggtggactgaagggcggatgggcctcaggggcagggctgtggcctgggtggcatgaggggtgggtggaccttgggggaagagatgtggccctcagtgccctgaggggtgggtggggctcggggacagggctgtggcctcgctcacccctgtgctgtgccttgcctacaggtgaagtggatcttctcctcggtggtggacctgaagcagaccatcgtccccgactacaggaacatgatcgggcagggggcctagggccaccctctgcggggtgtccagggccgcccagaccccacacacgagccgtgggccatgctcagccaccacccaggccacacctgcccccgacctcaccgccctgaaccccatggctctctggcctcgaagtcaccttctgacccctgacacgccccccttccagaccctgtgcatagcaggtctaccccagacctccgctgcttgatgcatgcagggcgctgggggccaggtgtcccctcagcaggacgtccctgccctccagaccaccaggtgctcacacaaaaggagtcagtgaccggcatcccaggcccccacccaggcaggacctcgccctggagccaaccccgtccacaccagcctcctgaacacaggcgtggtttccagttggtgagtgggaaaatcagccgccaaggtagggaagccacagcaccatcaggccctgttggggaggcttccaagagctgcgaaggctcactcagacggccttcctcccagcccgcagccagccagcctccattccgggcactcccgtgaactcctgacatgaggaatgaggttgttctgatttcaagcaaagaacgctgctctctggctcctgagaacagtctcggtgccagcaccaccccttggctgcctgcccacactgctggattctcgggtggaactcgacccgcagggacagccagccccagagtccgcactggggagagaaggggccaggcccaggacactgccacctcccacccactccagtccaccgagatcactcagagaagagcctgggccatgtggccgctgcaggagccccacagtgcaagggtgaggatagcccaaggaagggctgggcatctgcccagacaggcctcccagagaaggctggtgaccaggtcccaggcgggcaagactcagccttggtggggcctgaggacagaggaggcccaggagcatcggggagagaggtggagggacaccgggagagccaggagcgtggacacagccagaactcatcacagaggctggcgtccagtcccgggtcacgtgcagcaggaacaagcagccactctgggggcaccaggtggagaggcaagacgccaaagagggtgcccgtgttcttgcgaaagcagggctgctggccacgagtgctggacagaggcccccacgctctgctgcccccatcacgccgttccgtgactgtcacgcagaatccgcagacaggaagggagactcgagcgggagtgcggccagcgcctgcctcagccgtcagggaggactcccgggctcactcgaaggaggtgccaccatttcagctttggtagcttttcttcttttaaattttctaaagttcattaattgtctttgatgtttcttttgtgatgacaataaaatatcctttttaagtcttgtacttcgtgatgggagccgccttcctgtgtccacgtgcctcctgcccccggtgggaaacacggtcaggaggaggctggtccagctgcacctcgggggctccctgcacacgccccccgcctcctgcagccacacgcattgcccgagcgaccctccctggcccctgtcgctacatggacccccggggcttctcctcttttctacatggatgcagtttctcctcctgctgggcacggtgctgcctgccctggtcactctgcgggggacagggcctccagggaaagctgggtcgaggctgggagctggctcaggctggccaggcagagccacagggagggccttccagaaccaaccatggtccgaagcgagaggtgggtgtcagatctgtgtgagtcagctcaggaccacagcggggcggctcccacggcagacatggatcctcccaggcctagagaccaggaatctgagatcaggatgcaggcagggctggtttctctcaagccctctctccttggcttgtagacaccgtctcctccctggtcctcacgtggccatccctctgtgtgcccgtgtcctaagcttctcttcttagaacacacatcggattagattagtgaccccctatgaacttaatgacctctgtaaagaccccatctccaaatagtcacattgtgaggccagggattaagacttgaatatatgaatttgtaggggccacaatttaacccatcacagtccagactctgggccccaaaattcatgttcttctcacatgcagaatacattcatcctgtctcagcatccccctgggcactaggtcatgtagcaaggacagattttcaacagaaataactattgcaacagaagaaagagtccggcatgacctggactcaccttcatctgtgcagaggccacagccttgtaaagggaggtggtagggggagcagggagggtgctcggggctcagtcttcggggaagggaaaagttgcccagcgctggtcagcgtccccgggatgggacccgctgtgtccgtgccggccactgttgaggtcaggattctgtcctcccagagcctggagacacaggccccatccttcccaatggggacacttcagggagcggctctcaagtcttgagaaagaccctcctgggtcacaggaaatgcacagacatcgggaacggatagaaggtcgtgtggttgcggccctctcagcagataccctgagaaagggaggtcggggttggtccaaacggtgagttctggtgcacggagctttctcaggcaggtgttgacggggcaggggtcggcctaggggtacggccagaagctgttagaaactgttagtgtctgctcaagtctttacaagccaaggttgaggccgagtggagaggctccgaggagcctggctggaactcagtcaaggacagggtcttgttactgcagtggctgcggtggctgcggtggctggaaaatgccgtcggagttgcctgtggcaggagagagaccatctcacccaggaaggaggagtggttggattcgtttgtgtggcatcgagcagctggagctgcaccagagttgggggtgaaatccccagagcccggaccctgctgtgccgtgggagggctcgccgctggagggtgggcttcagggtgcctggcctgaactgggtgctgaagcccagccctttaactctcaggacacgctgctgcagccccgcggggggtgagggagagagcacctggggtgcagggcgggcagcagctgcatcaccggctctatcccaagcccaaggatggcccctccctgaagcacccaggccccacctccccctttccacctggaaccgagcatcctccagagggccagtcctcctgcaggaacaccacgcccagccccaggaccctccctcaactctccagcaaggctgcctccacgcaccccctagcagtccatgctgtgatgtaacatgacatggtgtgatgtggtgtgatatccatggtgtgccagggtgtaatgtgtgatgtgacaggacatggtgtgatgtggtatgacagagtgtgacatccctggtgtgacatggtgtgatgtggtgtgatgtgatgtgacatggttggacatggtgtgatgtggtgtgacatagtgggatggggcatgacatccctagtatgataggatatgatatggtgtgatgtggtatggtgtgacatggtgggacatcctgtgacagagtgtgacacccctggtgtgatgtggtgtgacgtagtgtgatgtgatatgacctgatgtgatgcggtgtgacatccctggtgtgatggggtatgatatcatttaacgggtgtgatgtgatgtgatgtgatggagtgtgacatctctggtgtgacatgtgtgatgtggtgtgacagagtgtcacatcgttggtgtgatgtaatgcagtgtgacatggtgtgatgtggcatgatggggtgtgacagggttcgacctccctcatgtgatgaggagttgcatggtgtgatgtggtatgacatggtgtaatgtcccttctgtgatgtggtgttgggctacaaggttggacatggtgtgatgtggtgttacatccctggtgtgatgcagtgtgacatagtattatatggtatgacatccctggtatgatggggcataatatggtttgatgtggaatggtgtgacatgatgtgatgtaatgggacaaggtgtgacatccctagtgtgatgtggtgtgatgaagtgtaacaggctgtgacatagtgtggtgtggtgtggtgtgacatgatgtgatgtggtttggcataatgtgacgtgttctgatggggcgtgacgcccctggtgtgatggggtgtgatgttgtgtggcattatgtgaagtggtgtgatgacgggtgacatccacggtgtgatggggtgtgatgtggtgtgatgtggcatgacataaggtgatgtggcataacatccctggtgtgatggggtgtgatgtggtgtgacacaatttgatgtggtgtattgtggtgtgacataatgtgatgtggcataacatccctggggtaatggggtatgatgtagtttgacatggcgtgacgtaatgtgatgtggtgtgatggggtgtgacaactctggtggggtggggtgtgatgaagtgtggtgtgacatgatgtgatgtctgatgtgctgtgtcagggtgtcacatacttggtgtgatgtgatgcggtgtgacacagtgtgatgtggcatgatggggtgtgacctggtacgacatccccagtgtgatgaggagttacatagtgtgatgtggtgtgacatccctggtgtgacatagtgtgatatggtgtgatgaagggaacccctggcttatagaggtgtaaaataggtcaaaggaaataaaagatgcagagctcaatagaatgaaataacctggaagagggtacaagacgatgccttgctttccatggaaggcacctactaatcttttgtttttctcaatgtttcctataaacatatataactgactgacacaaacagatccataatataaagaagacccctgtaaaccaacgagaaaaaaaatcaaataattcaacaaggaataggcaaaagaattgaacagatgttttacagaagatatccaaatagccgctaaacatatgaaaaggtgttgaaccacactagtcaacagggaaatgaaaatgaaaaaccacatgagagaaagtagttctgattccagtaatgctggagcagctaatatcagactagccctttggcagatggcaattataaacactggaaaagctgtaagcacacacaacacccacacacaccaattgcaggcactggaacatgaccagaagtaggcaaacactagtaaggattattcccggaaatattggtctgaagtcacaccccagggcatgtaatgggtgcagctagagttcaagcaggaaactgcagccctcctggtgaggagtgggatgcagggctgcattttcagagcagctggaaatgaagagaagatgtccataaaggagaaggtcaccaaagggaaaccccacaatctgcaagtaaactccactgaaacctctggccgatcccttaggtgtgcatgggtagggaaaactccaaagggcccagcagaaagcagcacctgtaaggtcgagagaactgagattccagctactgccaactgccaggcagacagacttgggagtttgagtcaactcaagctgtttcctaacattgaaaaaaacaatcaatgccctgccaaggaagaacgcaaaacccatagcctgtaccacatgttatcaacaacatcaggtgcacatccaaaattaccatatatgcaaagaaacatgaaaatgtgatccatagtcagaagaaaaagggatcaatggagatcaactccaagatgacctagatgcagacccagttttcacacaaggactttaaagaagtcatgttaaatatgttcaaagacttaaaggacaatatggttataatgagtgactagatggggaatctctgtaagaaagggaaaatattaacaagaaccaaatgaaaattctagaactaaaagtatgattctgaaatgaaaaacatcatttggccaggcacagtggcccatgcctgttatcctagcactttgggaggccaagaaggaaggatcacttgatcccaggagtttgagaccagcctgggcaacatggagaaatcccatctctattttattaaaaaagaaaagaaatagaaaaacattactcaagtttcataacagaatggagcagacatgagaaggaactgaaaacttaaagatgcatcaatagactatgtcaattatttttaatctaatgcaaagaagagagagaaaaatactaaaaatgaaaagagactcatcctgctggacaaggcgaagcattctaaaacatgtgaaactggagtccagagggggatgtaatacttccatgggaaaggtcaaccctaagctatatgcaaatgtacctgcgtaggctggtgtgctgggttgatggcatctccctggccaaatgtatgcccacctggaacctcagaatgtgaccatatttagaaatagggtctttacaaattagtttaaggacttgagatgatatcatactaaattttcgatgggtcccaaatccaaagactggtgtcctcatgagaggagaggacacagacacacatggaagtagccagatgatgacaaaggagaagatgaggggtgtgtcaggagccacctgtgtttgtccctttgcattactgtaaagaaatacatgaggctgggtaacttataaaggaaagagattgaattagctcacagttctgcaggctttataggaagcatggcatcagcatctgcttctggcgaggacctcaggaaacttacaatcatagcagaaggtgaagggagagcaggtatgccacatggcaagaatgggagcaagaggctgagggggggcccagacttaaacaactagactgtgtgtgagctgactgggggagaattcactcatcaccaaggggaagatgctcaatcattcatgagggatctgcccccttgatctaatcacctcctagtggccccacttccaacactgggaatcatattacaacatgagatttggaggggacaaatatataaaccatatccttccacccctggtcccccaaatctcatgtccttctcatgttgcaaaatacaatcatgccttctcaacagtcccccaaagtcttacctcattccagaatcaacaaaaaattcccaagtcccaagtctcatctgaagatgagtcccttccacctatcagcctaggaaatcaaagacaaattgactcccaaaatacaatgagagtgcagacattgggtaaacattcccattccacaagggagaagttggcaaaaagaaaggatctacatgccccatacacgtcagaaatccagcagggcagttattaaatcttaaagctccaaggtaatctcctttgacttcatgtcccatatccagggcacactggtgcagggggtgggctcccaaagccttggacaactctacccctgtggctttggaggatgtagcccctgtggcttctctcacacgatagagttgagtgcctgtggcttttccagattcagggtgcaaactgccagtggatctaccattctggggtctggaggacagtggcccccttcccacagctccactaggcagtgccctggtggggacattatatgggggttcaaccccacattctctttggcactgctctagtagaggttctctgtgagggctccatgctggcaggaggcttctctctgggcacctagggtttctcatacatttctgaaatctagagtgaagatgccaagcctccttcactcttgcattctgggggcctacaggcttaacaccagatggaagttcccaaggcttatagtggcttgcactctccaaagaagcagcctaagctgtacttggggccctttgagccaaggctggagccagaggaaccaggatgtggagagcagtgtcccaaggctgcacaggcagcagtggccatgggcatggcccacaaaaccatcctttccctcttggcctctgggcctgttatgggaaagaccacctcagagatttccgaaaggccttcaaggcctttttccctttgttctggatatgagcacttagctcccttttagttatgctaatctctctagcaactggctgctccatagcctacttatatttgtctcctgaaaataccttttcttttctaccacatggccaggctgtgaattttccacattttttatgctctgcttccctttgttgatgaaaaaagccaaactccataaaacacttgacgagattgattctgagccacatgtgagagccatgaactgtggcacagcctcaaaaggtcctgagaacacctgtgcaaggtggttgggttgcggcctgcttttatgttttagggagacatatcaatcaatacatgtaaagtatacattggtttggtttggtttggaaaagcaggacaattcaaagtggggaattccaaatcataggtggatttgaagattttctgattggcaattggctgaaaaagttaaattatctaaaaagttgaagtcagcaaaaagcaatgcttaagataagggggttgtggaagccaagtttcttgttatgtagatgaagcctccacgttccagagagaagagatggtcaatgtctcttatcagaacctaaaaggtgccagactcttggataaatctctcctgaatcaggaagagacctggaaagggaaaaagattctcaacagaatatacatttcctccacaagagacggctttgcagggcccttccaaaatgtgtcagagaaatatattctggcataaaatactttaatttccttccatgcctgccacctgtcatgtgatgctataccagaatcaggttgggatttgatatcttattgctacaaagagtctgctttgtcagtcttaagctccctgttttaatgttaacactggtcagctgagcctaagctccaacagggagagggtatagtgagggagtccaaaccaccctccccttcctgtcatggcctgaactggttttccaggtttctttggaatccccttggattagcattttattttgtcgtttacaccttttaaatataagttccaactttaagtcatttctttgctcccatatcttaccatagactgttagaagcaaccaggtcacaccttagaaacatctgcttagaaatgtcttccacagatgccctaagtcatcactcttaaggtcaaccttccacagatccctagggcatgaacacaatgcagccaagttgtttcttaggatttaacaagcgtgacctttacaccagttcccaataagtttctcatttccatctgagatttcatcagcctggctttcacagtccatatgtctatcagcattttggtgacaaccatttaatagtctctaagaaattccaaactttccctcatcttcctgtcttcttctgagtcctccaaattcttctaacctctctgcctgttacctgattccaaagctgcttccacattttcaggtatccttatagcaatgttccactcctcaataccaatgttctgagttagtctatttgtgttactagaaaaaaaaaaaaaacatgaatctggtaatttataaagaaaagaggtttgcaccaggcactgtggcaaggaagggaggattaactagctcacagttctgcagccattccggaaacacggccctggcatctgcttctggcgaggcctcagggagattgcaatcacggcagaaggcgaagggggagcaggcatgtcacatggcaagagggagcaagagaagagaagtggcacgtcctagacttttaaacaaccagctgtcacagggactaactgagggagaactcactcatcacctgggagatggtgctaggccattcatgaggggtccagccccatgatctaatcacctcccaccaggcccacctccaacactgggaatcacatctcaacatgaaatttggagagacacacatccaaactattgcaccacaggaagctggaagaggtggacggtcctcccctggagcactcagagacagccaccaacaccttgatctcagattcctgactcccagaactctgaaaaaatttttgttgttttaagccacatttgtgatattttgttacggcagccacagcacggatatagctggtaacagagttctttagcctccaaaatacaagcctggggtaaataactattgaatttggccacatggaaatcaggaagaatgtaataagcatcatcgatggacgggatgacctgggagatcgtggcaagtttaaagctaattggaagttggcaaccaaaaaatcctgtcttgcaaattgccaggaaattgccaagaaaacttttagaaaacatggttaaagatggagaaacctggatgaatccctggtttctgaagaggtgcttaggcattgaagtgagactgatgagacttcacactgtaccttcagaagggcagacactcacgagatcatcaaccacggctccctcgctgggaggcagacacagagctggaggcggcggccacaaactaggtgggcagagaggcgtcagcatcgggacttgcgggaggccctgggaaggaacaggcagcggtggggcctggacagccctggggaaaggaagttacttggaggagaccaggggcttgcatttgggccaaaaccaaggacaagagatcagctggtcccagggaactctggagcccagcaccccaccacgggtgcagggtcctgacaacccgagagggctgtgggcaccgggcaccagcctgtggggattctgaaggctgctgcccagccacacgtcccggttctgaacaaagggttcaagagacacctgcaaacctacctttctgagagcagcctcttagcctcagctggtattggcctttggtcaccccacatgccccgacagtggggcctggcctcagaaaggggcccctccatttgtactttctatctgatccttgacacagtgctaacaccaaagaccaaacccgaatcttggttcacatactctgcaaagaaatgactaagactagttcttccggaggtcagttttagaacgtttattctgacttaattctgccttatctctgtgcaccaagaaaactatctgcacatctgtagtaaaatgtgaaggtaccttcattttgtttgtatactaaacttttaagaaatacctcactttttaaaacttggttttgtgttttgtatgcttataatattttccataatagatcattttaatgatgaactctgagtcttctgacagaatgcagatcaatggattcctagccatcagggaggcgttgattgcaaaggggcctggtggaatttttggagagattctacatcttcttgcaactgttcatctggattacggtggtggttgcatgactgtgcatttgttgaaacttacatgtcacaggatggattatactgaatgtaaactacacttgagtaaatatgacttttaaaactttaaaaagttgggggatggttcactgccccggctcgaagccccctggccacgctgcctggccagcccacccccatccctgccagcgcttgcctccagcgtcccaacagcctcctgaccccctgggctgctctaaaccctcaggagcgcagccatccgggatcagctggatggagatggggagcccgagactcgtgccacaccacgtcctcccgcccacaccagccacacgcagacgtcaaagcagcactgtcctcgcacgcactgctcccacccaccctggcacggccattccaggcctggggcaggaaggcagatgctccccctgcccccagacacaagcattcctgcacacacccccagcacacacacgcactcccatgcgcacactgacacacacaggtgtgtgcagctgagacacagcccgttcccaggaagcccagcccccatcactgagggaaaggggcagcaccgtagggccacaggagtggcagctggacacagagccaggagctggtgaaggcccaggccactgaggcgggctgccggcatggctgggcgtgaaggccagaagagggcaggaggggctgggggcactatgcctattgggcctaggtgggcacacgccgggcaggagaggaacagcccagcccctcagacaggaaggggtgggggcaggggccatttgtggaggccagggcagggccagcaccccaaggaaaagcagagcagggtgagaacggacatggggctcagagctgagcaggcctgctgggccccaggagggagacacagatgaccggagatctcaaggctggcagaggccagagatggagccccagctgggaagccatcctccttcctgggggcccacgctgcccggcccctccagcccagcaagcttggggcattggatagaaccgggagagagccgaccaggcactgaggcccctgccccaaatgcccacagcctggggaaaatgagcaggtacatgggaggggcaagtggagccccaggcacacccacacagtgcacacggcctcacctgggccggagggggcaggaggctcgccaccccgctgtggtttctctcctaatctcaccctgggtttctctcacacttgatgcagatgatgtttctctgacattgtggactaagagttggtgctggaaggggttagccatcttggagatgttgctatgggatgcagggattttgcgtgtgagaaggacatgattatggggggaacggagggcaaactgtcatgggttaaaatgtgtcccctataaattcatgtgttgaagtcctaacccccaggaccgcagaatgtgaccttgtctggaaacagtctttgcagctgcaatcaagttcagatgaggtcaccctggagtagggcaagcctctgatccaatatgactgctgtcctcatgaaaagggggaatctgggcacagacagcacgtggggagaacgccctgtgaagatggtgctgcttccataagccaagagcaccagagacggccggcaaagcccagcagcaaggagagagcctgggacagagtctcccatgacacagaggagccagccccaccgaggcctccatcccagatgcccggcctccagaaccaggacggaataaacgtctgttgtttaagccacgcagtctggggtgcagtgttgccagggccacagttaacggatacgagtgttgtcctgagctgccagccccacaggctgcacgaggcctccctgccccagcccagtgcagactccccagccccctgggtgtgccatgggcagtggggggcccctcactccgtcctcccccagcctgggaggttgagcccattatgagctccatggggtgaagctggaacgagaggctgggagccgactgggagcctgcggctggaggatggatttccccagggacccacacgtgcacctccacctgtctcctggacattctctctgagggcagggctggtgccagctcagggatccagcagggtcacaagggcaggccgggtccttgtggagagcacatttagtgggagggacatgatttcccttcaaagtgcccattctggacgcttcccgttccatgctggacgcttcctcttccacgctggatgcttcctgttccacgctggatgcttcctgttccacgctggatgtttcctgttacactctggatgcttcctgttccacactggatgcttcctgttccatcctggatgcttcctgttccatgctggacatttcctgttccactctggatgctccctgttccatgctggatgcttcctgttccatgctggatgcttcctgttccatgctggacatttcctgttccactctgcatgcttcctgttccactctggatgcttcctgttccacactggacgcttcctgctccacgctggacgcttcctgttccatgctggatgcttcccgttacattctggatgcttcccgttccatgctggacgcttcctgttccacgctggacgtttcttgttccactctggatgcttcctgttccacgctggatgcttccttttccacgctggacacttcctgttccgcgctggacacttcctgctccacactggacgcttcctgctccaggctggacgcttcctgttccatgctggatgcttcctgttacattctggatgcttcccgttccatgctggacgcttcctgttccacgctggacgtttcttgttccactctggatgcttcctgttccacgctggacgcttcccattccactctggatgcttcctgttccatgctggacatttcttgttccactctggatgcttcctgttccatgctggatgcttcctgttccatgctggatgcttcctgttccatgctggacgtttcttgttccactctggatgcttcctgttacatgctggatgcttcctgttccatgctggacgtttcttgttccactctggatgcttcctgttccatgctggatgcttcctgttacattctggatgcttcctgttccatgctggacatttcctgttccactctggatgcttcctgttacattcttgatgcttcctgttccatgctggacatttcctgttccactctggatgcttcctgttacattctggatgcttcctgttccatgctggacatttcctgttccactctggatgcttcctgttacattctggatgcttcctgttccatgctggacatttcctgttccactctggatgcttcctgttacattcttgatgcttcctgttccatgctggacatttcctgttccactctggatgcttcctgttacattctggatgcttcctgttccactctggacgcttcccattccactctggatgcttccttttccatgctggacctttcttgttccactctggatgcttcctgttccatgctggatgcttccttttccattccggacacttcctattccattctggacacttcctgtgcgacacctcctcgggcttttggtctgcccagtccctctggcctcataccatccccccttacctcccacttccacgttcgtccttcctcagctcctccctctctctagagcttcggcctggcaaggtccctcctgatctcagtccaggctcccccagcacaggtaggagacttgcacctgcccttggacctccccaccctgcatgatgccagcatcccccaggccccagggaggccccatttctctctctgcttgtagtccagtggccctggagtgccactgcaactcgggtgtgcccctcgcctctgaggaagctaagtgccctaagctaagcagaggccatcccctctgctcagccccagggccctgccccctaccccttcccctcacctgcaccacaggctctggccaactctgcccaggctctgaatgggcccctctggctcccctctgctgctacactgccctgcaccacctccactcagcttcagtgtgttcatccacctgtcccacgtcccctcggcccccaggagcacagctggtggccctggctcctggcagcccatcttgttccttctggagcaccagcctcagaagccttcctgtgcagggtccactcggccagccctgggaccctcctggtctcaagcacacacattctccctgcagccagacctgcccctgcctgtgagctcagacctgagccttggaacgccttcccttctccatcccagctcgcctttgccagctgctcagcgggatgaactcacactcccctccctgcaccatgagtgagagccagctggagagacgcccaggccaaagcagccaccagggcccagtgggggtcagaagcttcaggtgagaggcccaggtattgagaggctgagaccacgggcagaatggtcataatcactgccagtatcagtccagccccagggactcagagacagagaaaagagcagtgaacaaggtccgggctccccaccttctcccacgagtatgggggcagccaccacccccatccccacacacccatgaggcagcctcggctgtgtctggactcccccttaccctgtgacacagaaaccaccagaagaaaagggaacttcaggaagtaagcggtgccgccggtttcaatcctgttcttagtctttgcagcgtggagttcacacccctggggacctgagggccgagctgtgatttcctaggaagacaaatagcagctgacggcgtgggcaagtctgcccacatgtaccgcgccaaaacaggaagggctgagacccccacctcggtgagtagggtcagcacagggcaagggcacaggctcgggaggagaaggacagagcctgggtgcagccgtgggcgctcctggacctcagctgctgaacaggctacaagaggctggggagacgtgggggcaaggccagccccacatggagacccaagcggagccagcacgggggaggtgggcagccttcaggcaccaacgcccacccagtgcaagatgacggggaccgtgggcaggggcttccaagccaacagggcaggacacaccagaggctgactgaggcctccatgacgaccaggctgggagcacgaggaacctgacgggatgcggcagagccggccgtggggtgatgccagcatgggcaggacccacctgagctgaggaggcagtagaacgagggaggaggagaggccccaggtgaacggaggggcttgtccaggccagcagcatcactggagcccagggcagggtcagcagtgctggccgtggggccctctctcagccaggaccaaggacagcaggtgagccgggagcagagcagggagggtgagtgtggcagcaggacaggagggtggaagccaaggagcccagaggcagaggcagggacaggggaggcacaggggctaggctcagagccacctgatggcgctggggcacctgctggcggggagcagggctgtggtcagcagcggagtggaggggagagctgtgctgagtgcacagatgggaggagggaagagtccagggaggcccagaaaggcccagagtgcagcaggcctggggcgaggggaggggtgaggctccgtgcgttcagggagctgacccagcagagcagaggccactgaggagctgaggttctggagaggcttccagagcaggagcagtgcagggacgggaggatctgggagctcacccaggaggggcacatgggcaagggcaaggggctctgttggggagacctgactggacactggggctgctccacagcatagggaacaagccaagtgctgcaaaaacaaaaatgaggccagaaaaacagcccaaacctggacagagggtgccaggacaggcaggggggcaacagtgacctgagtgacattgctgcccgggttgagggagggcagagtgagcagggggcaggcattggagttcagggtaccaggaccgagcagccacaggtgagcagggcaggtgggggcagaaggagcagggggcacctcctggagctcagcagaccagggcagagcaactgaaggtgaacaagggcaggtgggaggcaggatgagcagggggaagaccctggagctcaggggaccagggcagagcagcctcaggtgcctcaggtgagcaggggctggtgggtggcaggacgagtaggggacagctcctggagctcaggggaccaggacagagcatcaagagctgagcatggctagtgggaggtgggcgaacagggtgcagcccctggaactcgggaccagggcagagcagcggcaggtgagcacgggctggtgggaggcaggaggaacagggggcagctctgggacttcaggggaccaggggagggcatctgaaggtgaacaggggctggtgggggcaggaagagcagggggaagcccctggagctcaggggaccagggcagagcagccacaggtgagcaggggctggtaggaagcaggaggagcaggggacagcccctggagctcagagcaccagggcagagcaccctcaggtaagcaggggcaggtaggaggcaggacgagcaggggacagcccctggagctcaggggacagaggagagcatcagaaggtgagcaggactgaggcttagcctcagggaatcagagcagagcagccacaggtgagcagggccggtgggaggcaggacgagcaggggacaggcactagagctcagggcaaggcaaccacaggtgagcagggccggtgggaggcatcactcagctcctagattttggcaggagctgggtagttgctggcagcagacagctgagggctggtgaaagtgcagtgcagcctcctggtgccaggaagggagtgtgagcccatcccactgagcagttggcaagggtgagctgggatggagaagggaaggcattccagggctcggggctgagctctcaggcaggggcaggtgtggctgcagggggaatgtgtgcttgagaccaggagggtcccagggctggccccagcggaccctaggcaggaaggcctctgaggctggcgccccagaaggagcaagatgggctgccaggagccagggccaccagcacaatgaagctgagtggaggtggtgcagggcagtgtagcagcagagggctgccagaggggcccattcagggcctgggcagagtcagccagagcctgtggtgcaggtgaggggaaggggtggtgagcggggccctggggctgagcagaggggatggcctggctgagggcagggcacttagcctcctcagaggtcaggggcacaccccacctgcagtgggactccagggccactgggccagcggcagagagaaatggggcctccctgtggcctgggggtcctggcaccacgcagggtggggagggccaagggcaggtgcaaggctcctacctgtgctggggggcctgggttgagcccagcagggaccttgccgggggaagctctggagagagggaggaggtgggctggtggccgagaaggccaggccagggctgggagggtgaggttgtggtgactgagcctccagaagtaatgcaggacactgggaggcagggggcatccaggcactcagggccctgacctgggctgctgcacactggggctaaggggaaaggaggggagaggctgaggaggaggctccaggaggctattccaaggcagggggttccggggccctggggctgaagggcgccgaccctatgcagtgtctggcccctctgctgcacagaagaaaagggccttggagggcagagggcaggctatgaccagggccctgggcaagtcaggcccactcactagcggagggccacgctggggcggcagggtcaggagcttcaggggactcgggggacccacgagaagccatctgagaacagtgtccactggtcaagccaggcacccataaaaggctggagtggggccaatgggcatgagccgtccctgaggtggcaccgatggccagagctgaggccaagctagaggccctggactgtgctgactcccggcaggcacagagcgctgacctggctgccgagccccgcctcctaggctgcaggggtgcctgcagaagggcaccacagggccaccggtcctgcaagctttctggggcaggccgggcctgactttggctttggggcagggagggggctaaggtgacgcaggtggcgccagccaggtgcacacccaatgcccgtgagcccagacactggaccctgcctggaccctcgcagatagacaagaaccgaggggcctctgcgccctgggcccagctctgtcccacaccgcggtcacatggcaccacctctcttgcagcctccaccaagggcccatcggtcttccccctggcgccctgctccaggagcacctccgagagcacagcggccctgggctgcctggtcaaggactacttccccgaaccggtgacggtgtcgtggaactcaggcgctctgaccagcggcgtgcacaccttcccggctgtcctacagtcctcaggactctactccctcagcagcgtggtgaccgtgccctccagcaacttcggcacccagacctacacctgcaacgtagatcacaagcccagcaacaccaaggtggacaagacagttggtgagaggccagctcagggagggagggtgtctgctggaagccaggctcagccctcctgcctggacgcaccccggctgtgcagccccagcccagggcagcaaggcaggccccatctgtctcctcacccggaggcctctgcccgccccactcatgctcagggagagggtcttctggctttttccaccaggctccaggcaggcacaggctgggtgcccctaccccaggcccttcacacacaggggcaggtgcttggctcagacctgccaaaagccatatccgggaggaccctgcccctgacctaagccgaccccaaaggccaaactgtccactccctcagctcggacaccttctctcctcccagatccgagtaactcccaatcttctctctgcagagcgcaaatgttgtgtcgagtgcccaccgtgcccaggtaagccagcccaggcctcgccctccagctcaaggcgggacaggtgccctagagtagcctgcatccagggacagaccccagctgggtgctgacacgtccacctccatctcttcctcagcaccacctgtggcaggaccgtcagtcttcctcttccccccaaaacccaaggacaccctcatgatctcccggacccctgaggtcacgtgcgtggtggtggacgtgagccacgaagaccccgaggtccagttcaactggtacgtggacggcgtggaggtgcataatgccaagacaaagccacgggaggagcagttcaacagcacgttccgtgtggtcagcgtcctcaccgtcgtgcaccaggactggctgaacggcaaggagtacaagtgcaaggtctccaacaaaggcctcccagcccccatcgagaaaaccatctccaaaaccaaaggtgggacccgcggggtatgagggccacatggacagaggccggctcggcccaccctctgccctgggagtgaccgctgtgccaacctctgtccctacagggcagccccgagaaccacaggtgtacaccctgcccccatcccgggaggagatgaccaagaaccaggtcagcctgacctgcctggtcaaaggcttctaccccagcgacatctccgtggagtgggagagcaatgggcagccggagaacaactacaagaccacacctcccatgctggactccgacggctccttcttcctctacagcaagctcaccgtggacaagagcaggtggcagcaggggaacgtcttctcatgctccgtgatgcatgaggctctgcacaaccactacacacagaagagcctctccctgtctccgggtaaatgagtgccacggccggcaagcccccgctccccaggctctcggggtcgcgcgaggatgcttggcacgtaccccgtctacatacttcccgggcacccagcatggaaataaagcacccagcgctgccctgggcccctgcgagactgtgatggttctttccgtgggtcaggccgagtctgaggcctgagtggcatgagggaggcagagcgggttccactgtccccacactggcccaggctgtgcaggtgtgcctgggccgcctagggtggggctcagccaggggctgccctcggcagggtgggggatttgccagcgtggccctccctccagcagcagctgccctgggctgggccacgggaagccctaggagcccctggggacagacacacagcccctgcctctgtaggagactgtcctgtcctgtgagcgccctgtcctccgacctccatgcccactcgggggcatgcctagtccatgtgcgtagggacaggccctccctcacccatctacccccacggcactaacccctggctgccctgcccagcctcgcacccgcatggggacacaaccgactccggggacatgcactctcgggccctgtggagggactggtccagatgcccacacacacactcagcccagacccgttcaacaaaccccgcgctgaggttggccggccacacggccaccacacacacacgtgcacgcctcacacacggagcctcacccgggcgaaccgcacagcacccagaccagagcaaggtcctcgcacacgtgaacactcctcagacacaggcccccacgagccccacgcggcacctcaaggcccacgagccgctcggcagcttctccacatgctgacctgctcagacaaacccagccctcctctcacaaggtgcccctgcagccgccacacacacacaggcccccacacacaggggaacacacgccacgtcgcgtccctggcactggcccacttcccaatgccgcccttccctgcagctgaggtcacatgaggtgtgggcttcaccatcctcctgccctctgggcctcagggagggacacaggagatggggagcgggtcctgctgagggccaggtcgctatctagggctgggtgtctggctgagtcccggggccaaagctggtgcccagggcaggcagctgtggggagctgacctcaggacactgttggcccatcccggccgggccctacatcctgggtcctgccacagagggaatcacccccagaggcccgagcccagcaggacacagtattgaccacccacttcctgtccagagctgcaactggaggagagctgtgcggaggcgcaggacggggagctggacgggctgtggaccaccatcaccatcttcatcacactcttcctgctaagcgtgtgctacagtgccaccatcaccttcttcaaggttggccgcacgttgtccccagctgtccttgacattgtcccccatgctgtcacacactgtccccatgctgtccccacatgtccctgacactgtcccccatgctgtccccacctgtcccggacactctcctccgcgctgtcttgacctgtgcccaacactgtcccccacgctatccccccatccccaacaatgtcccccacagtttcctcctgtcccctatccccgacactgtcctccacactgtccccacctctccctgtcactgtcgcccatgctgcccccacctgtcccaacactttcctccaagctgtcctcacctgtccccaacactctcccccacactctctccacctgtccctgacactctcccccatgctgtccccacctgtccctgatgctgtcctccacactgtccccacctctccctgtcactgtccccatgctgtcccctgtccctcacactttcctccatgctgtcctcacctgtccccaacactctcccccactgtctccacctgtccctgacactgtcccccacactgtccccacctgtccctgatgctgtcgtctgtgctgtccacatactgttggtgacctggctctgttctccaagttcaagcctcagagcaggcagtggtgaggccgtggcacctgggtggcctgaggggtgggcgggccttgggggcagggctgtggcctcgctcacccctgtgctgtgccttgcctacaggtgaagtggatcttctcctcagtggtggacctgaagcagaccatcgtccccgactacaggaacatgatcaggcagggggcctagggccaccctctgtggggtgtccagggccgcccagaccccacacaggagccgtgggccatgctcagccatcacccaggccacacctgcccccgacctcaccgccctcaaccccatggctctctggcctcgcagtcgccctctgaccctgacacgccccccttccagaccctgtgcatagcaggtctaccccagacctccgctgcttggtgcatgcagggcgctgggggccaagtgtcccctcagcaggacgtccctgccctccggcccgccaggtgctcacacaaaaggaggtagtgaccagcatcccaggcccccactcaggcaggacctcgccctggagccaaccctgtccacgccagcctcctgaacacaggcgtggtttccagatggtgagtgggagcatcagtcgccaaggtagggaagtcacagcaccatcaggccctgttggggaggcttccgagagctgcgaaggctcactcagacggccttcctcccagcccgcagccagccagcctccattccaggcactcccgtgaactcctgacatgaggaatgaggttgttctgatttcaagcaaagaacgctgctctctggctcctgggaacagtctcagtgccagcaccaccccttggctgcctgcccacactgctggattctcgggtggaactcgacccgcagggacagccagccccagagtccgcactggggagagaaggggccaggcccaggacactgccacctaccacccactccagtccaccgagatcactcggagaagagcctgggccatgtggccgctgcaggagccccacggtgcaagggtgaggatagcccaaggaagggctgggcatctgcccagacaggcctcccagagaaggctggtgaccaggtcccaggcgggcaagactcagccttggtggggcctgaggacagaggaggcccaggagcatcggggagagaggtggagggacaccgggagagccaggagcgtggacacagccagaactcatcacagaggctggcgtccagccccgggtcacgtgcagcaggaacaagcagccactctgggggcaccaggtggagaggcaagacgacaaagagggtgcccgtgttcttgtgaaagcggggctgctggccacgagtgctggacagaggcccccacgctctgctgcccccatcacgccgttccgtgactgtcacgcagaatccgcagacagggagactcgagcgggagtgcggccagcgcctgcctcagctgtcagggaggactcccgggctcactcgaaggaggtgccaccatttcagctttggtagcttttcttcttcttttaaattttctaaagctcattaattgtctttgatgtttcttttgtgatgacaataaaatatcctttttaagtcttgtacttcgtgatgggagccgccttcctgtgtccacgcgcctcctgcccccggtgggaagcacggtcaggaggaggctggtccagctgcacctcgggggctccctgcatacgccccccgcctcctgcagccacacgcattgcccgagcgaccctccctggcccctgtcgctacatggacccccggggtttctcctcttttctacatggatgcagtttctcctcctgctgggcacggtgctgcctgccctggtcactctgcgggggacagggcctccagggaaagctgggtcgaggctgggagctggctcaggctgcccaggcagagccacagggagggccttccagaaccaaccatggtccgaagcgagaggtgggtgtcagatctgtgtgagtcagctcaggaccacagcggggcggctcccacagcagacatggatcctcccaggcctagagaccaggaatctgagatcaggatgcaggcagggctggtttctctcaagccctctctccttggcttgtagacaccgtctcctccctggtcctcacatggccatccctctgtgtgcccgtgtcctaagcttctcttcttataagaacacacatcggattagattagtgaccccctatgaacttaatgacctctgtaaagaccccatctccaaatagtcacattgtgaggccagggattaagacttgaatatatgaatttgtaggggccacgatttaacccatcacagtccagactctggcccccaaaattcatgttcttctcacatgcaaaacacattcatcctgtctcagcatccccctgggcactaggtcatgtagcaaggacggattttcaacagaaataactattgcaacagaagaaagagtccggcatgacctggactcaccttcatctgtgcagaggccacagccttgtaaagggaggtggtagggggagcagggagggtgctcggggctcagtcgtcggggaagggaaaagttgcccagcgctggtcagcgtccccgggatgggacccgctgtgtctgtgccggccactgttgaggtcaggattctgtcctcccagagcctggagacacaggccccatccttcccaatggggacacttcagggagtggctctcaggtcccgagaaagaccctcctgggtcacaggaaatgcacagacatcgggaacggatagaaggtcgtgtggttgcggccctctcagcagataccctgagaaagggaggtcggggttggtccaaacggtgagttctggtgcacggagctttctcaggcaggtgttgacggggcaggggtcggcctaggggtacggccagaagctgttagaaactgttagtgtctgctcaagtctttacaagccaaggttgaggccgagtggagaggctccgaggagcctggctggaactcagtcaaggacagggtcttgttactgcagtggctgcggtggctgcggtggctgcgaaatgccgtcggagttgcctgtggcaggagagagaccatctcacccaggaaggaggagtggttggattcgtttgtgtggcatcgagcagctggagcttcaccaaacacagagttggggactaaatccccagactccaggccctgccatgccgtgggaaggctcgccactggagggtgcgctccagggggcctggcctgaactgggtgctgaagcccagccctttaactctcaggacacgctgctgcagccccgcggggggtgagggagagagcacctggggtgcagggcgggcagctgctgcatcaccggctctatcccaagcccaaggatggcgtcccagagatgcaggagagctttgtccagagaaggtgccagccctcagggaccctgctggagagatctccaccctctgcccttcaaggggccctacgggcctccaggtgctctggtggggtgggctccagtccactgtctgaggatggacggcctggccaggataaggaaaggaaacccaggacggtgccgggctccgggtcattccgtgcactgagcaggctgagttgggaagaagcagatgcttcctgcagctgctgccccctgcagggcctggcgcctggaccaggttcccctggggaaattgggcccctccctgagccacccggggcccacctcccactttctacctgggaccgagcatcctccagagggtcagccctcctgcgggaacaccatgcccagccccaggaccctccctcaactctccagcaaggctgcccctgcacaccccccagcagcccatgctgtgatgtaacatgacatcgtgtgacatggtgtgatgtcctatcacagtgtgacatccctggtgtgatgtggtgtgacatggtgggatgtggtgtgacatggtgtgatgtccctggtgtgaggtggtgttggacatagtgtgatgtgatgcgacagatgtaacatccctggtgtgatttggtgtgacgtagtgtgatgggtatgacatccctggcttgatgaggtataatatgaaatgatgtggaatggtgtgacatgatgtgatgtgatgggacagggtgtgacgtccctggtgtgatgtgatgtaacaggctgtgacatagtgtgatgtgggtggtgtgacatgatgtgatgtggtgtgatggtgtgggacatccctggtgtgatggggtgtgattaaaccttgattccatgcagcacatgtttctgtgagcacagggttggggctaaagttacaggttaacagcatctcaaagcagaacaatttttctttgtacagatcaaaatggagtttcttatgtgttccttttctacataggcacagtaacagtctgatctttcttttccccacagtgtgacatggtgtgacatttctggtgtgactcttgtgttgtgacatttgtggtcaccccaggatacagaggtctctgtggccaagggaagggggagaatggaaccatctgagcatgttgacctggaggaattggtggcccttgagtccacgaagcccacccttccaggtgcccctgccccacgtgacccaagtgggcttgcagagcagcaagcaggactctggttagacaggaggaaggacctgccaccacgtggccttgtgaggagacagagcgaggctgtgacctcggcgtccgcccagcacagggtgctgctgaagctcctccggtcctctcagcagcggtctcagagcaaggcccaaggcaggctgaagagaggggcagagggaggatgctggggaggcaggtgtgaggggactgagagcccaggtttcagctgagcccctccacagggaaggagcctagctgaacacccatctccccacacgctcccaaccctgcctctgcccgaccacctcccagagggcacctcgaaccctctgctacccacactcagcaaggggtatggtgcccccaccaagcccagccagcaaagcctggcacagccacgcctgtgcccaccactcccatggccaaggtcactgctaacatggcaggacagagccaggcctggaggagacagaacatcagtcccatggggaagctccctgctcacacggcagggccaggcctggagaagacagaacaccccatctggcatggtactcaggctgcacatgcctgccacgaacgggggccacgcgacaatgcctgccacacatgggggccacgcaacgatgcctgccacacatgggggccacgcgacgatgcctgccacacatgggggccacgcgacgatgcctgccacgcatgggggacacgtgacacacacatacacacacgggcctcacaggcacacaaatgcttgcgaacccagcacccacccagcacactcaggcataggctccctgggcaggtcacaacctcacgccttgagctagtccatgtgccaggcccgtcacccacgtactcgtccccggtgctagctattgagccacaccgtcttctctgtggatccctcccagcccactcagcacaatggacatgctctctcccgtccagtgactgcaccggcctcttcccctcagcacccaagtctggccatctcccaggaaacccggaccaccacgggcagggaccacgttcctcactgtccacgtggaccaccccacacctgaccccagatgcagtcacactacgtcctgcttcaatattgaaaaggggaaaagctggaggagggtaaagatgaaagagaaaaaagcaagaggggagggtcacattcttctgaggctttgattacatctcactgagcccccacgttgcatgaaaaggaggggtggagggagcaattacacatttgccttgtgctcagtaaatctgcactttataagcaaataaacagagtagaggaagaagtcaaatatgcattcgtctcaggggcaggagggatgatttcttgtctcattttgtcccatgtcatgaagaccgggctgttaatttatattgtcagggtgagggaggccacctgggtagacctggcctatctgctgctgctctcagtttggaaacaaaaggaaacgcatgactttttttttttttttcatgactcagcttcccacctcaactgttctttttggcatagtgactttagggtcctgagattttattttcctttcacaatggtcaagatcacaccctcagtattcaggagagctggtccaacccagacccctgccgtccctggacgcttttcaaatacgtgctgcagtctctgacactctctcaccatggtagaaactgaggtcttggtgagtctgcagcccctgctcatggggacaatgcaggctgaaacccgcatttctgaccccaaagctcctgttcctttcactcacccccacaccagctctttgagtccagagctttgtccttgcctgagtcctaccctcagggacaggggcccaacccagccaccaacacatcataccctgagagggtgccaggagcccagagatgtttggagagcacagtagccctggaagctctgtggagatgctgcacatttctctattcaacagatactcgccaggtggccagcagcagagatgccacatggcatggagctcgccttggccaacaggacaggtgtggggttgggaggccttcccagggcactccttgaagcagagctgtggggaaaagttggggccaatctcagatctccccgtcaacaccgggtctcctgccctcctgggccacagaaaactaagctccgtggatactgcggctgggtggggccgtgggggagaagaaatcacaacgagttaaaagatcattttctaaaactgttatgatcaggactcacataaccatatgacgacacatttcagagatgctctttatctcattaattaaggtgtcgtaaccagttcaaagtggaattctaagtactacacttacataattgattcaggaatgctaaaaggagttcatagatagatgcaaaactggccttttccctggaagatgaggagcaattcattgtccttccaaagatgagaacttgaatttctaccaactcaaagagcttttgcattgctatcaattatgtacaacttagagcagtggtccccaacatttttggcaccaggaaccagttccatggaagacaatttttccacagaccaggatcgggggatggcttggggacaaagctgttccacctcagatcattaggcattagggtgtcataaggagtgtgcaacttagatcccgggaatgtgcggctcgcaatagggttcgctcctgtgagaatctaatgctgccactgatctgacaggaggtggagctcgggcaggaatgctcacacacccctcacctcctgctctgtggcccagttcctaacaggccatgaaccggttccagtgcatgacccagggattggggacccctggcttatagaggtgtaaaatagttcaaaggaaataaaagatgcagagctccacagaatgaaataacctggaagagtgtacaagacgatgccttgctttccatggaaggcacctactaatttttctcaatgtttcctataaacatatataactgactgacagaaacagatccataatataaagaagacccctgtaaaccaatgagaaaaaaaatcaaataatccaacgaggaataggcaagagaattgaacagatgttttacagaagatatccaaatagccactaaacatatgaaaaggtgttgaaccacactagtcaacagggaaatgaaaatgaaaaaccacatgagagaaagtagttctgattccagtaatgctagagcagctaatatcagactagccctttggcagatggcaattataaacactggaaacactgtaagcacacacaacacccacacacaccaattgcaggcactggaacatgaccagaagtaggcaaacactagtaaggattattccgtgaaatattcgtctgaagtcacaccccagtgcatgtaatgggtgcagctagagtttaagcaggaaactgcagccctcctggtgaggagtgggatgcagggctgcattttcagagcagctggaaatgaagagaagatgtccataaaggagaagctcaccgaagggaaaccacacaatctgcaagtaaactccactgaaacctctggccgatcccttaggtgtgcatgggtagggaaaactccaaagggcccagcagaaagcaacacctgtaagtcgagagaactgagattccagctactgccaactgccaggcagacagacttgggagtttgagtcaactcaagctaactgctaacattgaaaaaaacaattaatgctctgctaagaaagaatgcaaaccccatagcctgtacgcatgttatcaacatcaggtgcacatccaaaattaccatggatgcaaagaaacatgaaaatgtgatccatagtcagaagaaaaagggatcaatggagatcaactccaagatgacctagatgcagatacagttatcagacaaggactttaaagaagttatgttaaacatgttcaaagacttaaaggaaaatactattataatgagtgactagatggggaatctctataagagacggaaaatatttacaagaaccaaatgaaaattctagaactgaaagtatgattctgaaatgaaaaacatcatttttcagagcagggtgagaatggacatgggactcagagctgagcaggcctggtgggccccaggagggagacacagaggactgggggatttcaaggctggcagaggccagagatggatccccagctgggactggacctgggcttatgggagcaacaggtgacccatcctccttcctgggggcccaccctgcccggcccctccagcccagcacaggcattggatagaaccgggagagagcaggccaggcactgaggcctctgccccaaatgcccacagcctggggaaaatgagcagatagatgggggggcaagtggatccccaggcacacccacacagtgcacacagccccacctgggccagagggggcaggaggctcgccacccctgctgtggtttctcccacacttgatgcaggtgatattcctctgagattgtggactaagagttggtgctggaaggggttagccatcttggagatgttgctatggggtgcagggattttgcatgtgagaaggacatgattatggggggagcggagggcaaactgttgtgggttaaaatgtgtcccctataaattcatgtgttgaagtcctaacccccaggaccacagaatgtgaccttgtttggaaacagtctttgcaactgcaatcaagttcagatgaggtcaccctggagtagggcaagcctctgatccaatatgactgctgtcctcatgaaaagggggaatctgggtacagacagcacgtggggagaacaccctgtgaagatggtgctgcttccataagccaagagcagcagagacggccggcaaagcccagcagcaaggagagagcctgggacagagtctcccatgacacagaggtgccagccccgccgaggcctccatcccagatgcccggcctccagaaccaggacggaataaacgtctgttgtttaagccacgcagtctggggtgctgtgttgccagggccacagttaacggatacgagtgttgtcctgagctgccagccccacaggctgcacgaggcctccctgccccagcccagtgcagactccccagccccctgggtgtgccatgggcagtgcggggcccctcactgcatcctcccccagcctgggaggttgagcccattatgagctccatggggtgaagccggagccagaagctgggagccgactgggagcctgcggctggaggatggatttccccagggacccacacgtgcacctccacctgtctcctggacattctctctgagggcagggctggtgtcagctcagggatccagcagggacacaagggtgggccgggtccttgtggagagcacatttagtgggagggacatgatttcccttcaaagtgcccattctggatgcttcctggtccacgctggacacttcctgttccacgctggacgcttcctgttccacgctggacgcttcctgttccacgcttgatgtttcctgttccatgctggatgcttcctgttccatgctggacatttcctgttccactctggatgctccctgttccattctggatgcttcctgttccatgctggacatttcctgttccactctgcatgcttcctgttccactctggatgcttcctgtgcgaaacctcctcgggcttttggtctgcccagtccctctggctgcatctcgtcccccgctacctcccacctccacatccgtccttgcccagctcctctctctctccagagtttccacctggcaaggtccctgatgagctcagtccaggctcccccagcacaggtaggagcctagcacctgcccttggacctccccaccctgcatgatgccagcatccccaggccccagggaggccccatttctctctctactgctggcccagtggccctggagtcccactgcaactcgggtgtgcccctgacctctgaggaagttaagtgtcctgtccctagccaggctatcccctctgctcagccccagggccctgccccttaccccttcccctcacctgcacgataggctctggccaactctgcccaggccctgaatgggcccctctggctcccctctgctgctacactgccctgcaccacctccactcagcttcagtgtgttcatccacctgtcccaagtcccctcggcccccaggagcacagctggtggccctggttcctggcagcccatcttgttccttctggagcaccagcctcagaggccttcctgtgcagggtccactcggccagccctgggaccctcctggtctcaagcacacgttctccctgcagccagacctgcccctgcctgtgagctcagacctgagccttggaacgtcttcccttctccatcccagctcgcctttgccagctgctcagtgggatgaactcacactcccctccctccaccatgagtgagagtcagctggagagatgcccaggccaaagcagccaccagggcccagtggggggccagaagcttcaggtgagaggcccaggtattgagaggctgagaccatgggcagaatggtcataatcgctgccagtctcagtccagccccagggactcagagacagagaaaagagcagcacacaaggtccgggctccccaccttctcccgtgagtatgggggagtatgggggcagccaccacccccatccccacacacccatgaggcagcctcggctctgtgtggactccccctcgccctctgacacagaaaccaccagaagaaaagggaacttcaggaagtaaggggtgccgctggtttcaatcctgttcttagtctttgcagcgtggagttcacacccctggggacctgggacctgagctgtgatttcctaggaagacaaatagcggctgacggcgggggcggggccgcccacatgtacctcgccagaacaggaagggttgagacccccacctcggtgagtggggtcagcacagggcaggggcacaggctcgggaggaggacagcctgggcgcagccgtcggcgctcctagacctgagctgctgaacaggctgcaagaggctggggagacgcgggcgcgaggccagccccacatggaagcccaagcggagccagcacgggggaggtgggcagccttcaggcactgatgcccacccagtgcgagacgacggggaccgtgggcaggggcttccaagccaacagggcaggacacaccagaggctgactgaggcctccaggacgaccgggctgggagcacgaggaacatgacgggatgcggcagaaccggctgtggggtgatgccaggatgggcacgaccgacctgagctcaggaggcagcagagcgagggaggaggagaggccccaggtgaacggaggggcttgtccaggccggcagcatcaccagagcccagggcagggtcagcagagctggccgtagggccctcctctcagccaggaccaaggacagcaggtgagccgggagcagagcagcgagggtgagtgtggcagcaggacagaagggtggaagccaaggagcccagaggcagaggcagggacaggggagggacaggggctgggctcagagccagctgatggggctggggcacctgctggcggggagcagggctgtggtcagcagcggagaggaggggagagctgtgctgagtgcacgggcgggaggagggaagagtccagggaggcccagaaaggcccagagtgcagcaggcctggggcgaggggaggggctgaggcccagcagagcagaggccactgaggagctgaggttccggagaggcttccagagcaggagcagtgcagggacgggaggatccgggagctcatccaggaggggcacataggcaaggggctctgttggggagacctgactggacactggggctgctccacagcatagggaacaagccaagtgctgcaaaaacaaaaatgaggccagaaaaacagcccaaacctggacagagggtgccaggacaggcaggggggcaacagtggcctgagtgacattgctgccccgggttgagggaggacagagtgagcagggggcaggcattggagttcagggtaccaggaccgagcagccacaggtgagcagggcaggtgggggtagaaggagcagggggcagctcctggaactcaggggaccagggcagagcagccacaggcaaacaggagaggggagggggggcaggaggagcagggggcagctcttggagctcaggggaccagggcagagacgccgcaggtgagcaggggcaggtgggggggcaggaggagcagggggcagctcttggagctcaggggaccagggcagagcagccacaggtgagcaggggcaggtggggggcagaaggagtagggggcagctcttggagctcagaggaccagggcagagcagccacaggggaggaggggcaggtgggaggcaggatgaacagggggcggctcctggaactcaggaaacaggggagagcatcagaaggtgagcagggccagtgggaggttgcagagcaggggacagctcctggagctcaggggaccagggcagagccgccgcaggtgagcaggggcaggtggggggcaggaggagcagggggcacctcctggagctcaggcgaccggggcagagcagcctcaggtgaaaagggccggtggggggcaggaggagcaaggggcagctcctggaggtcaggggaccagggcagagccgccgcaggtcagcagggccggtgggaggcaggacgagcaggggacaggcactagagctcagggcaaggcagccacaggtgagcagggctggtgggaggcatcactcagctcctagactttggcaggagctgggtagttgccggcagcagacagctgagagctggtgaaagtgcagtgcagcctcctggtgccgggaagggagtgtgagtccatcccactgagcagttggcaagggcgagctgggatggagaagggaaggcattccagggctcagggctgggctctcaggcaggggcaggtgtggctgcagggggaacgtgtgcttgagaccaggagggtcccagggctggccccagcggaccctgggcaggaaggcctctgaggctggcgccccagaaggagcaagatgggctgccaggagccaggaccatcagcacaatgaagctgagtggaggtggtgcagggcagtgtagcagcagagggctgccagaggggcccattcagggcctgggcagagtcagccagagcctgtggtgcaggtgaggggaaggggtggtgagcggggccctggggccgagcagaggggatggcctggctgagggcagggcgcttagcctcctcagaggtcaggggcacaccccacctgcagtgggactccagggccactgggccagcggcagagagaaatggggcctccctgtggcctgggggtcctggcaccatgcagggtggggagggccaagggcaggtgcaaggctcctacctgtgctggggggcctgggttgagcccagcagggaccttgccgggggaagctctggagagagggaggaggtgggctggtggccgagaaggccaggccagggctgggagggtgaggttgtggtgactgagcctccagaagtaatgcaggacactgggaggcagggggcatccaggcactcagggccctgacctgggctgctgcacactggggctaaggggaaaggaggggagaggctgaggaggaggctccaggaggctattccaaggcagggggttccggggccctggggctgaagggcgccgaccctatgcagtgtctggcccctctgctgcacagaagaaaagggccttggagggcagagggcaggctatgaccagggccctgggcaagtcaggcccactcactagcggagggccacgctggggcggcagggtcaggagcttcaggggactcgggggacccacgagaagccatctgagaacagtgtccactggtcaagccaggcacccataaaaggctggagtggggccaatgggcatgagccgtccctgaggtggcaccgatggccagagctgaggccaagctagagacactggactgtgctgactcccggcaggcacagagcgctgacctggctgccgagccccgccccctaggctgcaggggtgcctgcagaagggcaccacagggccaccggtcctgcaagctttctggggcaggccgggcctgactttggctgggggcagggagggggctaaggtgacgcaggtggcgccagccaggcgcacacccaatgcccgtgagcccagacactggaccctgcatggaccatcgcagatagacaagaaccgaggggcctctgcgccctgggcccagctctgtcccacaccgcggtcacatggcaccacctctcttgcagcttccaccaagggcccatcggtcttccccctggcgccctgctccaggagcacctccgagagcacagccgccctgggctgcctggtcaaggactacttccccgaaccggtgacggtgtcgtggaactcaggcgccctgaccagcggcgtgcacaccttcccggctgtcctacagtcctcaggactctactccctcagcagcgtggtgaccgtgccctccagcagcttgggcacgaagacctacacctgcaacgtagatcacaagcccagcaacaccaaggtggacaagagagttggtgagaggccagcacagggagggagggtgtctgctggaagccaggctcagccctcctgcctggacgcaccccggctgtgcagccccagcccagggcagcaaggcaggccccatctgtctcctcacccggaggcctctgaccaccccactcatgctcagggagagggtcttctggatttttccaccaggctccgggcagccacaggctggatgcccctaccccaggccctgcgcatacaggggcaggtgctgcgctcagacctgccaagagccatatccgggaggaccctgcccctgacctaagcccaccccaaaggccaaactctccactccctcagctcagacaccttctctcctcccagatctgagtaactcccaatcttctctctgcagagtccaaatatggtcccccatgcccatcatgcccaggtaagccaacccaggcctcgccctccagctcaaggcgggacaggtgccctagagtagcctgcatccagggacaggccccagccgggtgctgacgcatccacctccatctcttcctcagcacctgagttcctggggggaccatcagtcttcctgttccccccaaaacccaaggacactctcatgatctcccggacccctgaggtcacgtgcgtggtggtggacgtgagccaggaagaccccgaggtccagttcaactggtacgtggatggcgtggaggtgcataatgccaagacaaagccgcgggaggagcagttcaacagcacgtaccgtgtggtcagcgtcctcaccgtcctgcaccaggactggctgaacggcaaggagtacaagtgcaaggtctccaacaaaggcctcccgtcctccatcgagaaaaccatctccaaagccaaaggtgggacccacggggtgcgagggccacatggacagaggtcagctcggcccaccctctgccctgggagtgaccgctgtgccaacctctgtccctacagggcagccccgagagccacaggtgtacaccctgcccccatcccaggaggagatgaccaagaaccaggtcagcctgacctgcctggtcaaaggcttctaccccagcgacatcgccgtggagtgggagagcaatgggcagccggagaacaactacaagaccacgcctcccgtgctggactccgacggctccttcttcctctacagcaggctcaccgtggacaagagcaggtggcaggaggggaatgtcttctcatgctccgtgatgcatgaggctctgcacaaccactacacacagaagagcctctccctgtctctgggtaaatgagtgccagggccggcaagcccccgctccccgggctctcggggtcgcgcgaggatgcttggcacgtaccccgtgtacatacttcccgggcgcccagcatggaaataaagcacccagcgctgccctgggcccctgcgagactgtgatggttctttccacgggtcaggccgagtctgaggcctgagtggcatgagggaggcagagcgggtcccactgtccccacactggcccaggctgtgcaggtgtgcctgggccgcctagggtggggctcagccaggggctgccctcggcagggtgggggatttgccagcgtggccctccctccagcagcacctgccctgggctgggccacgagaagccctaggagcccctggggacagacacacagcccctgcctctgtaggagactgtcctgttctgtgagcgccctgtcctccgacccgcatgcccactcgggggcatgcctagtccatgtgcgtagggacaggccctccctcacccatctacccccacggcactaacccctggcagccctgcccagcctcgaacccacatggggacacaaccgactccggggacatgcactctcgggccctgtggagggactggtccagatgcccacacacacactcagcccagacccgttcaacaaaccccgcactgaggttggccggccacacggccaccacacacacacgtgcacgcctcacacacggagcctcacccgggcgaaccgcacagcacccagaccagagcaaggtcctcgcacacgtgaacactcctcagacacaggcccccacgagccccacgcggcacctcaaggcccacgagccgctcggcagcttctccacatgctgaccagctcagacaaacccagccctcctctcacaaggtgcccctgcagccgccacacacacaggggaacacacgccacgtcgcgtccctggcactggcccacgtcccaatacagcccttccctgcagctggggtcacatgaggggtgggtttcaccatcctcctgccctctggggctcagggagggacacgggagacggggagtgggtcctgctgagggccaggtcgctatctagggccgggtgtctggctgagccccagggccaaagctggtgcccagggtggacagcttccgggagctgacctcaggacattgttggcccatcccggccgggccctacatcctgggccccgccacagagggaatcacccccagaggcccaagcccagggggacacagcactgaccacccccttcctgtccagagctgcaactggaggagagctgtgcggaggcgcaggacggggagctggacgggctgtggacgaccatcaccatcttcatcacactcttcctgctaagcgtgtgctacagtgccaccgtcaccttcttcaaggtcggccgcacgttgtccccagctgtccttgacattgtcccccatgctgtcacacactgtccctgacactgtcccccactctctccacaaactgtccctgacactgtcccccatgctgtacacacctgtccaacagtgtcccccaggctgtctccacatgtccgacactgtcccccatgctatcccccatcctgacactgtcccccacactgtccccacctgtccttgatgctgtgccccacggtctccccacctctccctgattctgtcccccacgctgtacctgtccccaatgctctcccccagcctgtccccaacactgtccgccatgctgtcccacctttcccccacactgtcccccagtctccgcctgtccctgacgctgtcccacatgcggtcccccattcctgatactgtcccccatgctgtccccaccttccccaacactgtaccccacagtccccaccttccccaacactgtccccacctgtccctgacactcccccatgctgtccccacctgtcccccactcaccccccacactgtccctgtctctgacactgtcccccatgctgtccgcacctgtccccgtcccccacgctgtccctacctgtccctgacactgtcccccatgctgtcccccactttccccagctttccctgtcccccacgctgtccctacctgtccctgacactgacccccatgctgtccgcacctgtcccccactctccccacctctccctgtcacccacgctgtccctacctgtccctgacactgtcccccatgctgtccccacctgtcccccaatctccccacctctccctgtcccccacgctgtccccacctgtccctgacgttgtcttctgtgttatccacatgctgtcactaccatggctctgctctccatgtccaggcctgggggcaggcagtgtagagccccggtacctgggtggcctgaaaggcagatgggccttgggagcagggctgtggcctgggtggcctgaggggtgggtggggctcaggggcagggctgtggcctcgctcacccctgtgctgtgccttgcctacaggtgaagtggatcttctcctcagtggtggacctgaagcagaccatcgtccccgactacaggaacatgataaggcagggggcctagggccaccctctgcggggtgtccagggccgcccagaccccacacacgagccgtgggccatgctcagccaccacccaggccacacctgccccctgacctcaccgccctcaaccccatggctctctggcttcgcagtcgccctctgagccctgaaacgccccccttccagaccctgtgcatagcaggtctaccccagacctccgctgcttggtgcatgcagggcgctgagggccaggtgtcccctcagcaggacgtccctgccctctggaccaccaggtgctcacacaaaaggaggtaaccggcatcccaggcccccactcaggcaggacctcgccctggagccaaccccgtccacgccagcctcctgaacacaggcatggtttccagatggtgagtgggagcatcagtcgccaaggtagggaagccacagcaccatcaggccctgttggggaggcttccgagagctgcgaaggctcactcagacggccttcctcccagcccgcagccagccagcctccattccgggcactcccgtgaactcctgacatgaggaatgaggttgttctgatttcaagcaaagaacgctgctctctggctcctgggaacagtctcggtgccagcaccaccccttggctgcctgcccacactgctggattctcgggtggaactggacccgcagggacagccagccccagagtccgcactggggagagaaagggccaggcccaggacactgccacctaccacccactccagtccaccgagatcactcggagaagagcctgggccatgtggccgctgcaggagccccacagtgcaagggtgaggatagcccaaggaagggctgggcatctgcccagacaggcctcccacagaaggctggtgaccaggtcccaggcgggcaagactcagccttggtggggcctgaggacagaggaggcccaggagcatcggggagagaggtggagggacaccgggagagccaggagcgtggacacagccagaactcatcacagaggctggcgtccagtcccgggtcacgtgcagcaggaacaagcagccactctgggggcaccaggtggagaggcaagacgacaaagagggtgcccgtgttcttgcgaaagcggggctgctggccacgagtgctggacagaggcccccacgctctgctgcccccatcacaccgttccgtgactgtcacgcagaatccacagacaggaagggaggctcgagcgggactgcggccagcgcctgcctcggccgtcagggaggactcccgggctcactcgaaggaggtgtcaccatttcagctttggcttttcttcttcttttaaattttctaaagctcattaattgtctttgatgtttcttttgtgatgacaataaaatatcctttttaagtcttgtacttcgtgatgggagccgccttcctgtgtccacgcgcctcctgcccccggtgggaagcacggtcaggaggaggctggtcgagctgcacctcgggggctccctgcactcgccccccgcctcctgcagccacacgcattgcccgagcggccctccctggcccctgtcgctacatggacccccggggcttctcctcttttctacatggatgcagtttctcctcctgctgggcacggtgctgcctgccctggtcactctgcgggggacagggcctccagggaaagctgggtcgaggctgggagctggctcaggctggccaggcagagccacagggagggccttccagaaccaaccatggtccgaagcgagaggtgggtgtcagatctgtgtgcgtcagctcaggaccacagcggggcagctcccacggcagacatggatcctcccaggcctagagaccaggaatctgagatcaggatgcaggcagggctggtttctctcaagccctctctccttggcttgtagacaccgtctcctccctggtcctcacatggccatccctctgtgtgcccgtgtcctaagcttctcttcttataagaacacacatcgcattagattagtgaccccatatgaacttaatgacctctgtaaagaccccatctccaaatagtcacattgtgaggccagggattaagacttgaatatatgaatttgtaggggccacaatttaactcataacagtccatgctatggccccccaaatttcatgttcttctcacatgcaaaatacattcatctgtctcagcatcccccaagtcttagtcctttcagcatcaattctaagcctaaaatctcatcaaactgtcaccctcatcaggcacaggtgaaacctggtgtgtgattcattctatggtaaaattcagcccataggacacatggtgggtgccaggaacgaggacaaggcaggagaggcaaaggtggagagagacattttcaaagataaagctgggcactagatcatgtagcaaggacggattttcaacagaaataactattgcaacagaagaaagagtccggcatgacctggactcaccttcatctgtgcagaggccacagccttgtaaagggaggtggtagggggagcagggtgggtgctcggggctcagtcgtcggggaagggaaaagttgcccagcgctggtcagcgtccccgggatgggacctgctgtgtccgtgccggccactgttgaggtcaggattctgtcctcccagagcctggagacacaggccccatccttcacaaaggggacacttcagggagcggctctcaagtcttgagaaagaccctcctgggtcacaggaaatgcacagacatcgggaacggatagaaggacgtgtggttgcggccctctcagcagacaccctgagaaagggaggtcggggttggtccaaacggtgagttctggtgcacggagctttctcaggcaggtgttgacggggcaggggtcggcctaggggtacggccagaagctgttagaaactgttagtgtctgctcaagtctttacaagccaaggttgaggccgagtggagaggctccgaggagcctggctggaactcagtcaaggacagggtcttgttactgcagtggctgcggtggctgcggtggctggaaaatgccgtcggagttgcctgtggcaggagagagaccatctcacccaggaaggaggagtggttggattcgtttgtgtggcatcgagcagctggagctgcaccaaacacggagttggggactaaatccccagactccaggccctgccatgccgtgggaaggctcgccactggagggtgggctccagggggcctggcctgaactgggtgctgaagcccagccctttaactctcaggacacgctgctgcagccccgcggggggtgagggagacagcacctggggtgcagggcgggcagctgctgcatcaccggctctatcccaagcccaaggatggcgtcccagagatgcaggagagctttgtccagagaaggtgccagccctcagggaccctgctggagagatctccaccctctgcccttcaaggggccctacgggcctccgggtgccctggtggggtgggctccagtccactgtctgaggatggacggcctggccaggataaggaaaggaaacccaggatggtgccgggctccgggtcattccgtgcactgagcaggctgagttgggaagaagcagatgcttcctgcagctcctgcccctgcagggcctggcgcctggaccaggttcccctagggaaattgggcccctccctgagccacccggggcccaccgccccctttccacctgggaccgagcatcctccagagggtcagccctcctgagggaacaccatgcccagccccaggaccctccctcaactctccagcaaggctgcactgtgggcggcccctgcacataccccagcagtccgtgctgtgatgtaacatgacatggtgtgacgtggtgtgatgtctctggtgtgacgtggatgtcatgtggcatgatgtgacaggacatggtgtgatgttgtatgatgtggtatgacagtgtgatatccgaggggtgatgtgatgtggtgtgacatgttgtaatgtccctggtgtgaggtggtgttgcacatggtgggatgtggtgtgacatggtgtaatgtccctggtgtgaggtggtgttgcacatggtgggatgtggtgtgacacagtgtgacatccctggtgtgatgtgctgtgacatagtgtgatgggtatgacatccctggtatgatgagctataatatgaaatgatgtggaatggtgtgacatgatgtgatgtgatgggacaaggtgtgacatccctggtgtgatgtggtgtgatgaagtgtaacaggctgtgacatactgtgatatggtgtggcatgtgacgtggtgtgacatgtgatgtggtgtgatggggtgtgacatccctggtgtgatggggtgtgaggtagtttgacgtggtgtgatgtaatgtgatgtggtgtgatggggtatgacatctgtggtgtgatgaggtgtggtgtgacatgatgtgacgtgtgacgtgctgtgacagggtgccacatccttggtgtgatgtgatgcggtgtgacatggtgtgatgtggcaggatggggtgtggcagggtacgacatccctagtgtgatgatgagtttcatggtgtgatgtggcgtgacatccctggcatgacatagtgtgatgtggtgtgacatggtgtgacattcctggtgtgactctgctgttgtgacatttgtggtcaccccagcatacagaggtctctgtggccaagggaagggggagaatggaacgatctgagcaggttgacctggaggaactggtggcccttgagtccacgaagcccaccctgctaggtgcccctgccccacgtgacccaagggggttgcagagcagcaagcaggactctggttagacaggaggaaggacctgccaccacgtggccttgtgaggagacacagagcgagcctgtgacctcggcgtccacccagcacagggtgctgctgaagcccctcctgtcatctcagcaggggtcccagggcaaggcccgaggcaggctgaagagaggggcagagtgaggatgctggggaggcaggggtgaggggagtgagagcccaggtttcagctgagcccctgcacagggaaggaacctagctgaacacccatctccccacacactcccaaccctgcctctgcccgaccacctcccagagggcacctcgaaccctctaacacccacactcagcaaggggtatggtgtccccaccgaatccagccagtgaggcccggcacagccacgcctgtgcccaccactcccatggccaagctccctgctaacatggtaggacagggccaggcctggaggagacagaacatcagtcccatggggaagctccctgctcacatggcagggcagggcctggaggagacagaacgccccatctggcatggtactcaggctgcacatgcctgccacgcacgggggccacgcgacaatgcctgccacgcatgggggacatgtgatgctgcctgccacgcatgggggacacgcaacaatgcctgacacgcatgggggccacgtgacacacacatacacacacgggcctcacaggcacacgaatgtttgcaaccccagcacccacccagcacactcaggcacaggctctccaggtgggtcacagcctcacgccttgagctactccatgtgccaggcccttcacccacgttcctgtccccagtgccagctgttgagccacaccgtcttctctgtggatccctcccagcccactcagcacaatggacatgctctctcccgtccagtgactgcactggcctcctcccctcagcacccacgtctggccatctcccaggaaacccggaccaccacgggcagggaccaccttcctcactatccacatggaccaccccacacctgaccccagatgcagtcacactatgtcctgcttcaatattgaaaaggggaaaagctggaggaggggaaagatgaaagagaaaaaagcaagacgggagagtcacattcttctgaggctttgattacatctcactgagcccccacgttgcatgaaaaggaggggtggagggagcaattacgcattcgccttgtgctcagtaaatctgcactttataagaaaataaacagagtagaggaagaagtcaaatatgcatttgtctcaggggcaggagggatgatttcttgtctcattttgtcccatgtcatgaagaccgggctgttaatttatattgtcagggtgagggaggccacctgggtagacctggcctatctgctgctgctctcagtttggaaacaaaaggaaacgcatgactttttttttttttcatgactcagcttcccacctcaactgttctttttggcatagtgactttagggtcctgagattttattttcctttcacaatggtcaagatcgcaccctcagtattcaggagagctggtccaacccagacccctgccgtccctggacactttcaaatacgtgctgcagtctctgacactctctcaccatcgaagaaactgaggccttggtgagcctgcaagcccctgctcatggggacaatgcaggctgaaacccgcatttctgaccccaaagctcctgttcctttcactcacccccacaccagctctttgagtccagagctttgtccttgcctgagtcctaccctcagggacaggggcccaacccagccaccaacacatcataccctgagagggtgccgggagcccagagatgtttggagagcacagaagccctggaagctctgtggagatgctgcacatttctctattcaacagatactcaccaggtggccagcggcagagatgccacatggcatggagctcgccttggccaacaggacaggtgtggggttgggaggccttcccagggcactccttgaagcagagctgtggggaaaagttggggccaatctcagatctccccgtcaacaccgggtctcctgccctcctgggccacagaaaactaagctccgtggatactgcggctgggtggggccgtgggggagaagaaatcacaacgagttaagagatcattttttaaaactattatgatcaggactcacataaacatatgacgacacatttcagagatgctctttatctcattaattaaggtgtcgtaaccagttcaaagtggaattctaagtactacacttaacataattgattcaggaatgctaaaaggagttcatagatagatgcaaaactggccttttccctggaagatgaggagcaattcattgtccttccaaaggtgagaacttgcatttctaccaactcaaagagtttttgcattgctatcaattatgtacaacttagagcagtggtccccaacatttttggcaccaggaaccagttccatggaagacaatttttccacagaccaagatcgggggatgtcttggggacaaagctgttctacctcagatcattaggcattaggatttcacgaggagtgtgcaacttagatcccaggaatgtgcagctcgcaatagggttcgctcctatgagaatctaatgctgccactgatctgacgggaggtggagctcgggcaggaatgctcacacatccctcacctcttgctctgtggcccagttcctaacaggccatgaaccggttccagtgcatgacccaggggttggggacccctggcttatagaggtgtaaaatagttcaaaggaaatgaaagatgcagagctccacagaatgaaataacctggaagagtgtacaagacgatgccttgctttccatggaaggcacctagtaatcatttggtccatttcagttcttcttaatgcttcctataaacatatataactgactgacacaaacagatccataatataaagaagacccctgtaaaccaatgagaaaaaaaatcaaataatccaacgaggaataggcaagagaattgaacagatgttttacagaagatatccaaatagccactaaacatatgaaaaggtgttgaaccacactagtcaacagggaaatgaaaatgaaaaaccacatgagagaaagtagttccgattccaataatgctggagcagctaatatcagactagccctttggcagatggcaattataaacactggaaatgctgtaagcacacacaacacccacacacaccaattacaggcactggaacatgaccagaagtaggcaaacactagtaaggattattccctgaaatattcatctgaagtcacaccccagggcatgtaatgggtgcagctagagttcaagcaggaaactgcagtcctcctggtgaggagtgggatgcagggctacattttcagagcagctggaaatgaagagaagatgtccataaaggagaaggtcaccgaagggaaaccccacaacctgcaggtaaactccactgaaacctctggccgatcccttaggtgtgcatgggtagggaaaactccaaagggtccagcagaaagcagcacctgtatagtcaagagaactgagattgcagatactgccaactcccaggcagacagacttgggagtttgagtcaactcaagctaactgcttgctaacatgaaaaaaacaattaatgctctgctaaggaaggatgcaaaccccatagcctgtacacatgttatcaacaacatcaggtgcacatccaaaattaccatggatgcaaagaaacatgaaaatgtgatccaaagtcagaagaaaaagggatcaatggagatcaactccaagatgacctagatgcagatacagttatcagacaaggactttaaagaagttatgttaaaaatgttcaaagacttagagaatatggttatcatgagtgactagatgaggtatctctataaaaaactgaaaatagttacaagaaccaaatgaaaattctagaactaaaagtatgattctgaaatgaaaaacatttggccaggcccagtggctcatacctgtaatcctagcactttgggggcccaacagggaagtatcacttgatctcaggagcttgagaccagcctgggcaacgtggtgaaaccccatctctattttattaaaaaagaaaagaaagagaaaaacattacccaagtttaataacagattggagaagacaaaagaaggaactgaaaacttaaagatgcatcaatagaatatatcaattatttttaatccaatccaaagaaaagagagaaaaatactaaaaaaggaaaaaagactcatcctgctggagaaggcgaagcattctaaaacatgtgaaactggagtccagagggggatgtaatacttccatgggaaaggtcaaccctaagctatatgcaaatgtacctgcataggctggtgtggtgggctgatggcatctccctggccaaatgtatgcccacctggaacctcagaatgtgaccatatttagaaatagggtctttacaaattaggttaaggacttgagatgatatcatactaaattttggatggatcccaagtccaaacactggtgtcctcataagaggagaggacacagacacacgtggagataagccacatgatgacaaagaagaagatgaggggtgtgtcaggagccacctgtgtttgtccatttgcattactgtaaagaaatacctgaggctgagtaagttataaaggaaagaggttgaattggctcacagttctgcaggctgtataggaagcatggcaccagcatctgcttctggcgaggacctcaggaaacttacagcatagcagaaggtgaagggacagcaggtatgccacatggcaagaatgggagcaagaggctgaggggggccccagacttaaacaactagattgtgtgtgagctgactgggggagaattcactcatcaccaaggggaagatgctcaatcattcatgagggatcttcccccttgatctaatcacctcctaccaggccccacttccaacactgggaatcatattgcaacatgagatttggaggggacaaatatataaaccatatccttccacccctggtcccccaaatctcatgtccttctcatgttgcaaaatataattatgccttctcaacaatcccccaaagtcttacctcattccagaatcaacccaaaattcccaagtcccaagtctcatctgaagatgagtcccttccacctatcagcctaggaaatcaaagacaaattgactcccaaaatacaatgagtgtgcagacattgggtaaacattcccattccacaagggagaagttggcaaaaagaaaggatctacatgccccatacttgtcagaaatccagcagggcagttattaaatcttaaagctccaaggtaatctcctttgactgcgtgtcccatatccagggcacactggtgcagggggtggactcccaaggccttggaaatctctacccctgtggctttggaggatgtagcccctgtggcttctctcacacgatagagttgagtgcctgtggcttttccagattcagggtgcaagctgccagtggatccaccattctggggtctggaggacagtggcccccttcccacagctccgctaggcagtgccctggtggggacattatatgggggttcaaccccacattctctttggcactgctctagtagaggttctctgtgagggctccatgctggcaggaggcttctgtctgggcagctaggctttctcatacatttctgaaatctagagggaagatgccaagcttccttcactcttgcattctgggggcctacaggcttaacaccagatggaagtcaccaaggcttatagtggcttgcactctccaaagcagcagcctaagctgtacttggggccctttgagccaaggctggagccagaggaaccaggatgtggagagcagtgtcccaaggctgcacaggcagcagtggccatggccatggcccacaaaaccatcctttccctcttggcctctgggcctgtgatgggaaagaccacctcagagatttccaaaatgccttcaaggcctttttccctttgttctggatatgagcacttagctcccttttagttatgctaatctctctagcaactggctgctccatagcctacttatatttgtctcctgaaaataccttttcttttctaccacatggccaggctgtgaattttccacattttttatgctctgcttccctttgttgatgaaaaaagccaaactccataaaacacttgaaaaattgattctgagccaaatatgagagccatgaactgtggcacagcctcaaaaggtcctgagaacacctgtgcaaggtggttgggttgcggcctgcttttatgttttagggagacatatcaatcaatacatgtaaagtatacattggtttgatttggtttggaaaagcaggacaattcaaagtggggaattccaaatcatggtggatttgaagattttctgattggcgattggctgaaaaatttaaattatctaaaaagttgaagtcagcgaaaagcaatgcttaagataagggggttgtggaagccaaggttcttgttatgtagacgaaggctccacgttccagagagaagagatggtcaatgtctcttatcagaacctaaaaggtgccagactcttggataaatctctcctgaatcaggaagagacctggaaagggaaaaagattctcaacagaatatacatttcctccacaagagacggctttgcagggcccttccaaaatgtgtcagagaaacatattctggcaataaatactttaatttccttccatgcctgccacctgtcatgtgatgctataccagagtcaggttgggatttgataccttattgctacaaagagtctgctttgtcagtcttaagctccctgttttaatgttaacactggtcagctgagcctaagctccaacagggagagggtatagtgagggagtccaaaccaccctccccttcctgtcatggcctgaactggttttccaggtttctttggaatccccttggtttagcattttattttgtcgtttacaccttttaaatataagttccaactttcagtcatttctttgctcccatatcttaccatagactgttagaagcaaccaggtcacaccttagaaacatctgcttagaaatgtcttccacagatgccctaagtcatcactcttaaggtcaaacttccacagatccctaaggcatgaacacaatgcagccaagttgtttcttaggatttaacaagcgtgacctttaccccagttcccaataagttcctcatttccatctgagatttcatcagcctggctttcacagtccatatgtctatcagcattttggtgacaaccatttaatagtctctaagaaattccaaactttccctcatcttcctgtcttcttctgagtcctccaaattcttctaacctctctgcctgttacctgattccaaagctgcttccacattttcaggtatccttatagcaatgttccactcctcaataccaatgttctgagttagtctatttgtgttactagaaaaaaaaaaaaacatgaatctggtaatttataaagaaaagaggtttgcaccaggcactgtggcaaggaagggaggattaactagctcacagttctgcagccattctggaaacacggccctggcatctgcttctggcgaggcctcagggagattgcaatcacggcagaaggcgaagggggagcaggcatgtcacatggcaagagggagcaagagaagagaagtggcacgtcccagacttttaaacaatgagctgtcacagggactaactgagggagaactcgctcatcacctgggagatggtgctaggccattcatgaggggtccagccccatgatctaatcacctcccaccaggcccacctccaacactgggaatcacatctcaacacgaaatttgaagagacacacatccaaactattgcaccacaggaagctggaagaggtggacggtcctcccctggagcactcagagacagccaccaacaccttgatctcagattcctgactcccagaactctgaaaaaatttttgttgttttaagccacatttgtgatattttgttacggcagccacagcacggatatagctggtaacagagttctttagcctccaaaatacaagcctggggtaaataactattgaatttggccacatggaaatcaggaagaatgtaataagcatcctcgatggatgggatgacctgggagatcgtggcaagtttaaagctaattggaagttggcaaccaaaaaatcctgtcttgcaaattgccaggaaattgccaagaaaacctttagaaaacatggttaaagatggagaaacccggatgaatccctggtttctgaagaggtgcttaggcattgaagtgagactgacgagacttcacactgtacccttcagaagggcagacactcacgagatcatcaaccacagctccctcgctgggaggcagacacagagctggaggcggcggccacaaactaggtgggcagagaggcgtcagcatcgggacttgcaggaggccctgggaaggaacagggagcggtggggcctggacagccctggggaaaggaagttacttggaggagaccaggggcttgcatttgggccaaaaccaaggacaagagatcagctggtcccagggaactctggagcccaacaccccaccacgggtgcaggggcctgacgacccaagagagggctgtgggcaccgggcaccagcctgtggggggtctgaaggctgctgcccagccacacatgtcctggttctgaacaaagggttcaagagacacctggaaacctacccttctgagagcagcctcttagcctcagctggtattggcccctggtcaccccacatgccccgacagtggggcctggcctcagaaaggggcccctccatttgtactttctatctgatccttgacacagtgctaacaccaaagaccaaacccgaatcttggttcacatactctgcaaagaaatgactaagactagttcttccggaggtcagttttagaacgtttattctgacttaattctgccttatctctgtgcaccaagaaaactatctgcacatctgtagtaaaatgtgaaggtaccttcattttgtttgtatactaaacttttaagaaatacctcactttttaaaacttggttttgtgttttgtatgcttataatattttccataatagatcattttaatgataaactctgaatcttctgacagaatgcagatcaatggattcctggccatcagggaggcgttgattgcaaaggggcctggtggaatatttggagagattctacatcttcttgcaactgttcatctggattacggtggtggttgcatgagtgtgcatttgttgaaactcacatgtcacaggatggattatactgaatgtaaactacacttgtgtaaatatgacttttaaaactttaaaaagttgggggatggttcactgccccggctcgaagccccctggccacgctgcctggccagcccacccccatccctgccagcgcttgcctccagcgtcccaacagcctcctgaccccctgggctgctctaaaccctcaggagcgcagccatctgggatcagctggatggagatggggagcccgagactcgtgccacaccacgtcctcccgcccccaccagccacacgcagacgtcaaagcagcactgtcctcgcacccgctgctcccacccaccctggcatggccattccaggcctggggcaggaaggcagacgctccccctgcccccagacacaagcattcctgcacacacccccagcacacacacgcactcccatgcgcacactgacacacacaggtgtgtgcagctgagacacagcccgttcccaggaagcccagcccccatcactgagggaaaggggcagcaccgtagggccacaggagtggcagctggacacagagccaggcgctggcgaaggcccaggccactgaggcaggctgccggcatggctgggcgtgaaggccagaacagggcaggaggggctgggggcactatgcctattgggcctaggtgggcacacgccgggcaggagaggaacagcccggcccctcagacaggaaggggtgggggcaggggccatttctggaggccagggcagggccagcaccccaaggaaaagcagagcagggtgagaacggacatggggctcagagctgagcaggcctgctgggccccaggagggagacacagacgactggggatctcaaggctggcagaggccagagatggagccccagctgggatgccaacctccttcctgggggctcaccctgcccggcccctccagcccagcacagcttggggcattggatagaaccgggagagagccgaccaggcactgaggcccctgccccaaatgcccacagcctggggaaaatgagcaggtacatgggaggggcaagtggagccccaggcacacccacacagtgcacacagcctcaccggggcccgggaagtgggggaacaggaggctcaccacccctgctgtggtttctctcagaatcatgggtccttccagggaactcagcattttcccctcagcctcccacacggcacctttctccagggccacaagcagggcatgggggccttggacagcctgggaacactcacccccagcctgcgttccctgagcctcacatcatagccctccagggccctggcagccagcagcccttctggtgtcttccacacgtggtgagcatctctctgagggcaccaggcccgacagcccctctccctccacaggacaaccagccctgggcacccagggtcccaggggcaggtcccagtgtctccctccccaaagattctatacaacccacccctccccagtggccactccatgcatgctggcctccaggggacaggcaggccaatggtgtgaaggaaattatctcgctcagagcagagcactgggtgcaaccagggacgaatgccatgggcgcctccaggaaggccaccgagcccgagcccagccttctccatgtgcccacgcccacccatggcatagacggggcacagtgtccccagcctccagcagcttcaaggaccttgcagagccaccagccacctccgcacagctccctgccagcccccagccaggccccagccttcatgtgctcgccttgaggagcagcccagcttgggacccccggctgcaggacagtgacctgggagtgagtacaaggtgaggccaccactcagggtgccagctccaagcgggtcacagggacgagggctgcggccatcaggaggccctgcacacacatctgggacacgcggcccccgagggccagttcacctcagtgcgcctcattctcctgcacaaaagcgcccccatcctttcttcacaaggctttcgtggaagcagaggcgtcgatgcccagtaccctctccctttcccaggcaacgggaccccaagtttgctgactgggaccaccaagccacgcatgcgtcaagagtgagagtccgggacctaggcaggggccctggggttgggcctgagagagaagagaacctcccccagcactcggtgtgcatcggtagtgaaggagcctcacctgacccccgctgttgctcaatcgacttcccaagaacagagagaaaagggaacttccagggcggcccgggcctccgggggttcccaccccatttttagctgaaagcactgaggcagagctccccctacccaggctccactgcccggcacagaaataacaaccacggttactgatcatctgggagctgtccaggaacccgacagggagccggacgggccacaccatccacaggcaccaaatggacgacccggcgcttcaggtatcccagcccaccgggagccccaatcgaggggccggcccaggcagcagtgagggagaggctgcctgggcccctgacagcgaggggactcctgggccaccctcacagcatcaaccaagcttcttggtcactgcgtggactctaggcatcccttccctgcatggggacacaggaaagctagaaacagcctaacgccgacctggagaaggcagggggctgggaatcttggctgggcccaagaccaagaaggtcagagaccccacgctgggcagggctaggctgggtgcagactgcctgccacccctaggacagggacagccaacccagagctgggagggagggtggggaggcggcagcagggagctgtcctgagctccactgcgcaactggctgatcttggcaagtctgagctgggcggactgaggggggcttggctgagtggactagactgagacgggcctaacagactgagctgaggcgagctgggtgggctgagagggctaccctgtcccttagaggacaggtggccaagctgggctgtcctgagccagggcgatcggggctggcccgggccaggcgggtttagctgagttgagtgagtggactgggtagagggaaatgagctaggctcagctgagctaggcttgagctgggttatcctaagccctaaggtggactgagctgggctgagctggacttatctggggggcagggcaaagtcaggctgagctgaggtggcctgccctgggtggtccaggattgagttaagctgaattaggctgacctggacttgactggacttggttgaaataagctgggccgacacaggagtagggacaagctacagttctctacttaggataaaatgggtgctcgtggactatccgggctgaaggagaccaagctggggtattacctgctgagcttacctgacctggcctgagttcagcagggctgcgctgagctggacagacctgagccaagcttagctggttgggctgagtaagctgggctgagctaaatgggattgagctgaggagggctaggctgggggagagacctgacgacggacagggttaaaagctggagtgagcaggccttaaattattgaactaaattgggctggggtgatctgaatttagctgggatgagctgggctgggctgaactgtgcccacgtgaactgggctaaactaggctcgcctgagtggactcagctgggttggtctcaactgggttcagctgggctgggctgggctgagctaggttagactggggcaggctgggctgggttgggctgggttgggctgggctgctctaggctaagctaacctaacctaacctgggttcagctggcctaggttgggctgggttgggctaaactgggttcagctgagatatgctaatatgggctgggctgggtcaggttgaggttaactgaactgggctgacctgggctgagctcaactgagttcacatgggctgggctggcctggcctggcctaaactgggtttggctgggctgggccaactggactgaggtggatggagctgggctgagctggcctggccgggcctgagctgtgattggaagacctgggctgagctggacagacctgagccaagcttagctagttgggctgactaagctggtttgggctaaactgggttgagctggggaggactaggctgggtgagtgacctgagatggacagggttataagaagctggactgagctgggcttggattattgaaccgaattgggttggggtgatttaaactgagttctgctgggataagctgatctacgctgggctgaactgagcagagctgaacctagctgggctgggctaaactgggctagcctgagtgggctgaactgggctgctgggctggactgggtaagctgggctgagctgggttgggtggaaatgggctgagctgagctaggctaaactgggtttggctgggctgggctgggctgggctgggttcagctgagcggggttgggttagactgggtcaaactggttcagctgagatgggctgatatgagctgggctgggccaggctgagctcagctaaactgggcagtgctggactgggctgagctagactgggcaactgtattcagctgggctggcctggcctcggctaaactgggttcagctgggctgggctgagcaggcctgagcaggattagttgagctggtcgtaactggatttaactagctaggctaggcttaactgactaagctgatctggactgtattcatctggatgaagctggggtgaggtggctactttaggtccagctttgctgagctaaactggaccgggctaaattgatctggactgaccattctcacctggctaagaggagctgagtcagaagcaagctggttgagctggctggactgaaataagagtttgctgcctgcaaggggaggtcctgggctgacctgggccaggctgaaccaggctggcttagagtgaacttcagagggcgactcccccggtaggccagtctcagctgaacttggctgtcccggtgggcagagcggggctggatactgtgattttgggggtacctagagcagacttcaagaccaagctaaactgggctccaggggcaggatgggctggggacttgggactccaggccaggggcgaagggccacgctgtacagaccgcactatctgggccagggttctgtggtgggagggactgactgcctggggcatcagggcaagtcttcccgccctcccctagaggtcaggggtgggcagagcaccatgggggtctggcaggtcaggtgagggctgctgtgatggggagatccaggcttggcactcaagagcccgaggagctgagaccacagccttggggggttggggtcagggttggagggcaggcagaccatccaccatgagcccagagagagtttgaagggggagggctctggggtcccaggccccatggggtccctgggtttcagcctaggggcatggcccagtgtctctgctcctgagtgcccaccgtgcagcacttgcagggggaggctggggtcatcctggaggcaccccccttcctgagcccagcctgatgatagtggctgagcaacagcttctggtgggggaatgggggccctgggagccgccctgggcctggggattgtggggaaaaaggcccagaatgagcctggccatctggatccctgccacggggtccccagctcccccatccaggccccccaggcctgatgggcgctggcctgaggctggcactgactaggttctgtcctcacagcctccacacagagcccatccgtcttccccttgacccgctgctgcaaaaacattccctccaatgccacctccgtgactctgggctgcctggccacgggctacttcccggagccggtgatggtgacctgggacacaggctccctcaacgggacaactatgaccttaccagccaccaccctcacgctctctggtcactatgccaccatcagcttgctgaccgtctcgggtgcgtgggccaagcagatgttcacctgccgtgtggcacacactccatcgtccacagactgggtcgacaacaaaaccttcagcggtaagagagggccaagctcagagaccacagttcccaggagtgccaggctgagggctggcagagtgggcaggggttgagggggtgggtgggctcaaacgtgggaacacccagcatgcctggggacccgggccaggacgcgggggcaagaggagggcacacagagctcagagaggccaacaaccctcatgaccaccagctctcccccagtctgctccagggacttcaccccgcccaccgtgaagatcttacagtcgtcctgcgacggcggcgggcacttccccccgaccatccagctcctgtgcctcgtctctgggtacaccccagggactatcaacatcacctggctggaggacgggcaggtcatggacgtggacttgtccaccgcctctaccacgcaggagggtgagctggcctccacacaaagcgagctcaccctcagccagaagcactggctgtcagaccgcacctacacctgccaggtcacctatcaaggtcacacctttgaggacagcaccaagaagtgtgcaggtacgttcccacctgccctggtggccgccacggaggccagagaagaggggcgggtgggcctcacacagccctccggtgtaccacagattccaacccgagaggggtgagcgcctacctaagccggcccagcccgttcgacctgttcatccgcaagtcgcccacgatcacctgtctggtggtggacctggcacccagcaaggggaccgtgaacctgacctggtcccgggccagtgggaagcctgtgaaccactccaccagaaaggaggagaagcagcgcaatggcacgttaaccgtcacgtccaccctgccggtgggcacccgagactggatcgagggggagacctaccagtgcagggtgacccacccccacctgcccagggccctcatgcggtccacgaccaagaccagcggtgagccatgggcaggccggggtcgtgggggaagggagggagcgagtgagcggggcccgggctgaccccacgtctggccacaggcccgcgtgctgccccggaagtctatgcgtttgcgacgccggagtggccggggagccgggacaagcgcaccctcgcctgcctgatccagaacttcatgcctgaggacatctcggtgcagtggctgcacaacgaggtgcagctcccggacgcccggcacagcacgacgcagccccgcaagaccaagggctccggcttcttcgtcttcagccgcctggaggtgaccagggccgaatgggagcagaaagatgagttcatctgccgtgcagtccatgaggcagcaagcccctcacagaccgtccagcgagcggtgtctgtaaatcccggtaaatgacgtactcctgcctccctccctcccagggctccatccagctgtgcagtggggaggactggccagaccttctgtccactgttgcaatgaccccaggaagctacccccaataaactgtgcctgctcagagccccaggtacacccattcttgggagcgggcagggctgtgggcaggtgcatcttggcacagaggaatgggccccccaggaggggcagtgggaggaggtgggcagggctgagtccccccaggagaggcggtgggaggaggtgggcagggctgaggtgccactcatccatctgccttcgtgtcagggttatttgtcaaacagcatatctgcagggactcatcacagctaccccgggccctctctgcccccactctgggtctaccccctccaaggagtccaaagacccaggggaggtcctcagggaaggggcaagggagcccccacagccctctctcttgggggcttggcttctacccccctggacaggagcccctgcacccccaggtatagatgggcacacaggcccctccaggtggaaaaacagccctaagtgaaacccccacacagacacacacgacccgacagccctcgcccaagtctgtgccactggcgttcgcctctctgccctgtcccgccttgccgagtcctggccccagcaccggggccggtggagccgagcccactcacaccccgcagcctccgccaccctgccctgtgggcacaccaggcccaggtcagcagccaggccccctctcctactgccccccaccgccccttggtccatcctgaatcggcccccaggggatcgccagcctcacacacccagtctcgcccactcacgcctcactcaaggcacagctgtgcacacactaggccccatagcaactccacagcaccctgtaccaccaccagggcgccatagacaccccacacgtggtcacacgtggcccacactccgcctctcacgctgcctccagcgaggctactgccaagcccttcctctgagccatacctgggccgctggatcccagagagaaatggagaggccctcacgtggtgtcctccagtccaaccctccctgtcaccctgtcagcagcagcaccccacagccaaacacaggatggatgcgtgggctccatcccccactcacccacaccggaaccccagagcaggctacgtgcccctcacagacctcaaacccacatgtgcatctgacaccccagatccaaacgctccccccggtcatgcacaccaagggcacagcacccaccaaatccacacggaaacacgggcaccgggcaccccatgagcacaaagcccctccatgtctgaagacagtccctgcacaccgtcacagccatacattcagcttcactctcacgtcccagcccacctgcacccagctctgggcctggagcagcagaaagaggtgtgagggcccgaggcgggacctgcacctgctgatgacccgggaccagcaggcagctcacggtgttggggaagggagtggagggcacccagggcaggagccagagggaccaggctggtgggcggggccgggccggggtagggccaggaggcagctctggacacccacaggcctgggctcatagtccacaccaggacagcccctcagagcacccatgcagtgagtcccaggtcttgggagccaggccgcagagctcacgcatccttccgagggccctgagtgaggcggccactgctgtgccgaggggttgggtccttctctggggagggcgtggggtctagagaggcggagtggaggtaaccagaggtcaggagagaagccgtaaggaacagagggaaaatggggccagagtcggggcgcagggacgagaggtcaggagtggtcggcctggctctgggccgttgactgactcgggacctgggtgcccaccctcagggctggctggcggctccgcgcagtcccagagggccccggatagggtgctctgccactccggacagcagcagggactgccgagagcagcaggaggctctgtcccccacccccgctgccactgtggagccgggagggctgactggccaggtcccccagagctggacgtgtgcgtggaggaggccgagggcgaggcgccgtggacgtggaccggcctctgcatcttcgccgcactcttcctgctcagcgtgagctacagcgccgccatcacgctcctcatggtgggcacccacctccaggggcccggccagggcagggggttgggcagagccagcagagcgccctgacccacgccctcccctcaggtgcagcggttcctctcagccacgcggcaggggaggccccagacctccctcgactacaccaacgtcctccagccccacgcctaggccgcgggccactcacgctccaccaggcccagctttttctctgccagcgcctgagcctccctcgggctgcgccctgccctgggtgggaaaagggaagcagacaagaaaagggggcacaaggtcactactgtgggctgatggccagtgaacctgagcccagaggggccggctcagccgcaaggttacaggcgccgagagaaccaccagtcgcagcccccacccgaaaaccgtgtctgtcccttcaacagagtcatcgaggaggggtggctgctagccgttctgagctcatcccaggcccctgggtctccgggtcactcccattctgactgtacaatcaccaaaagccaaggagggcccggcacccagcccaggacacagctgagtctgcgtccagcccaacaccagcccacggcctcactccccagcctcggtctgacccttctagccctgaggtccaagtgtctggcatccccgtcccccaagcctcacccagaccttctttcccttcacccacccctcctgccacccatccacagcccccatcccttcacccacccctcctgccatctatcctcagcccccatcccttcacccacccctcctgccatccatccacagcccccatcccttcacccacccctcctgccatctatcctcagcccccatcccttcacccacccctcctgccatccacctgagcccccatcccttcacccacccctcctgccatccacctgcagcccccatttctgcagcctgaaggcacagggaagccctctgaggccaggccacaggacagttgagggcttcgggcccctggagtgggtagaggggctcccacagccagagaaggggtttcctgcagggacagcagctgccgacctcgtccctatgacctcgtccagcctctggcttcagcagtcatacttctttctctctgggtttcttagtaaagatccttttcacaaaccccacgtctccggagggctctgtgggaggtgtgtgtggccctggagtggctggcgggaggcaggacccctgaggacgtgcaggaggagccagaggggaaggaagggcaggggccattctggggtcctgagagccaaagtgcccaagcagtggttcccatcaatcacccctcagcaccccagagactccccagctcggccctgtcatacctggtctgctggtctccagcccagactcatgcctccttctcaggtaaagtcaaagcaacaatcaacatcgacccctttgtgggcaaaaccagaagaggcccatgctgtggtcagcacaggaggccccaagaatgcagctgcacagtcaccaaggtggaggctgatgggggcccctaggaccactggccacacaccctgatccagcacccactgagcacagacaaagctgactccccagcccacagccgcccaccagcctggacctcctgaagagctgagaggtgacccaggagcaggctggggccccagagccatcggggccacaggtgggcttgacccacaccagtcctcagggcaaatgtgcagcctccctggctggagaggcctgcttacaagggtctccacaacatcctaaaaatgggagagaacgcatgataggcatgacaaagggcagggttccctcatatacaaagagcactcagagatcactaagaagaaaggtgagcaataggttcttcatggaaaggaaaaacccagtggccgataatataaagaaaccattttaacaatgagaaaagtgaaaggaaggaggaggggatgaagggggtggaggtgcttcttggccctgactgagggcacgtaaatcattaagaccactttttagggccagttggcaaaatgccccaatgcaggagagtcctctcacagtgatggccccacagggagagcctcgctctgtgccaggagagccacgtcacatggagtctggcacaaagcggaatgaagcaagcctgcctcagtctgacagcggcacctgggccctccgccctgtcctctgctgcgacctcggagcagccgggcacgggggagaaggtgaggagcgacggctccctacggggtagaaaaccccaaagcgggcagcgctgaggccgactgggtccaaacaacaccagaggagggggcgtcgcaggacagggccaaggccacagccgctgcccagctcccctcacacactccctcattcacagacacacacgcaggcacacactcgcacatgcaaaaacacacaggttcacacacacagactcaacctctcatacacatttgcactcacacacaccaatcatgcactcacacaggctgacacgctcgggcacgctcataccaacacacacacagtctcaggaagccaggccctccatccaccccatcaccagcccagggtgtcgcaaacccacatctcctacaacagaccggccctccgcagccaaggtgccccggaccgggagcccccccgggggacagagctcagtgactttctctgccccgcaccctagatcatgagacctccatggccccagagcaagggcaaggagtcagctcactgccccactgtgtggcaggcgtcctcacgcacagaaaattccatcgcctcaaaggcctgagaggaagaccagatgagcacccacgtagaggagacagacggggcccgtggggaggggcagaggcccggattcacacccaggctcggaacagcgcccctgccttccacatggcctggcctcccgggagcaagaggatgccgtctcagggcctctccatccccctcttcattcccctattaacccacccgtgggtacaaccatggcccccaaaagatagagccacatcctagcccctggggccattgagtgcggcattatttgtcaaaagggcctttgcagatcccatcaagataaggatttcgaggtgagggcaccctggattgtcaaggatttcgaggtgagggcaccctggattgtcaaggatttcgaggtgagggcgccctggattgtcaaggatttcgaggcgagggcgccctggattgtcaaggatttcgaggtgagggagccctggattgtcaaggatttcgaggtgaaggaaccctggattgtcaaggatttcgaggtgagggcaccctggattgtcaaggatttcgaggtgaaggaaccctggattgtcaaggatttcgaggtgagggcaccctggattgtcaaggatttcgaggtgaaggaaccctggattgtcaaggatttcgaggtgagggcgccctggattgtcaaggatttcgaggtgaaggaaccctggattgtcaaggatttctaggtgagggcaccctggattgtcaaggatttcgaggtgaaggaaccctggattgtcaaggatttcgaggtgagggcaccctggattgtcaaggatttcgaggtgagggcgccctggattgtcaaggatttcgaggtgagggagccctggattgtcaaggatttcgaggtgagggagccctggattgtcaaggattttgaggtgaaggaaccctggattgtcaaggatttcgaggtgagggcgccctggattgtcaaggatttcgaggtgagggaaccctggattgtcaaggatttcgaggtgagggcgccctggattgtcaaggatttcgaggtgagggcgccctggattgtcaaggatttcgaggtgaaggaaccctggattgtcaaggatttcgaggtcagggcaccctggattgtcaaggatttcgaggtgaaggaatcctggattgtcaaggatttcgaggtgagggcgccctggattgtcaaggatttcgaggtgagggaaccctggattgtcaaggatttcgaggtgagggcgccctggattgtcaaggatttcgaggtgagggcgccctggattgtcaaggatttcgaggtgagggcgccctggattgtcaaggatttcgaggtgaaggaaccctggattgtcaaggatttcgaggtgaaggaaccctggattgtcaaggatttcgaggtgaaggaaccctggattgtcaaggatttcgaggtgagggcaccctggattgtcaaggatttcgaggtgagggcgccctggattgtcaaggatttcgaggtgagggaaccctggattgtcaaggatttcgaggtgagggcaccctggattgtcaaggatttcgaggtgagggcaccctggattgtcaaggatttcgaggtgagggcgccctggattgtcaaggatttcgaggtgagggcgccctggattgtcaaggatttcgaggtgagggcgccctggattgtcaaggatttcgaggtgaaggacaccctggattatcgagggggctaggtccgaggacaagtgtcctagctggagacagacgaggagacacagggatggggagaggcagaggcagacaggggtggtgctatggtctgagggtctgtgtctgcccgaaactcctgtgtgacagccgtcatcccagagtgagagcatgcagagctggggcctcagggaggtggttagggcctgagggggaacactcaaaaatgtgactcggtccctgatctcactagagacccaaaagaaaagggaccccagagagcagccctgccctctttccaccatgtgaggacgcagcgaaaagatgggggtctgtgaaccaggaatcggcccttcctggaacttgaccctgctgccatcctgaccttgaacttccagcttccctgagaaatgaatgttgctgctgaacccaccagtctatggtatttttgttattgcagccagaaatgactaagacgcagcagccacgtccccctggcgagggccgggggcatcccaaggttcataacaaaagctccagagcttccctgaaccgccaggtgtgtcttcccaggaccctggggcagccccaggctacctccctcctcctctggccccacctgccctgatccggcctcactgtcactccctggatttcacccgacagcctccgccggggtggcccggccccatggccagggcatcttccattcacgcccacgctttccaggactccgctgcagcagctcctctgtgaagcgcccctggcctcccattgccggtgccacccgagcccccagacatagctggcctcccccgactccagggccagcatcgctggcgggatctctccaacgcaacggccagctctctggtgacccacagtaggagtgccacctgggcagtgctggacagggtagagcaggcaccttggccgccctgacccgcagggctgcaggctaggagacggggtgcccccatgcccccaccctgggctgcagtctggggcccccagtggcccatggggcaggccgagggaggccaggcccgagtggctccaacccagcagcgcaagactcactctccccagcctgatgcccgccctgtggccccaaggccccttcaacgggagtccactcacaggcgcccttcccctgcgggtggtcggggaccctctctggccctgtgtctcccctttgccatctctgtctcggggtctctgagcctctaactgtgtctgttcctgtttccctgcagcgtggcccccaccccgccctgtggagccatgtggagccgtgaggctccacggccggtggggtcacagagccctggccacacacacctggccccaccacagccagaccacaggccagacatgacgtggagccgcgcagccgtgtctgctggggcaggaagtgggcgagtgaccccgtctgtaggccagacgtacgggcatgcaggccctcccctccagcccctcagcatccagccacatctgtggacacagccagcgcggcggagcagggctctgctaaggacagacggccatcaaggcaggacctgggccgggccagggctccctccccacagcagccctcttggcaggcagccagacgcccgtgagggtggacctgccatgagggcctgcacgccggaggccgcccactcagcactgcgggccctccagcagcctgaccaggtgggtcttggaggtctccaggcctccgtctccttctctgcacattgaggagtccagccaggctggtcctggccccttctggaagcaaaaggtggagaacaggcaccaagacaagagggaaggacaaaagaggtcaccacagggactccggaaccacagggcagggcttcctaaccaggcaggaaggatctgggcactgggggctgagccaggctggccaggcctaagctgggatgacccggcccttcctgggatacaaggtgaacagctttcatggctgagctgaggcctaagttgagccgaggcctaggctgagccgagccagagggcagaggagaagatgacctggagccaactgatacacgtccatgtgggctgccctgagctgccctggcctgggctgggctgagctaggctacactgggctgagctaggctacactggactgggctgagctgaactgagctgagctgggctgagctgggctgggctaggctgggctgagctgggctgggctgagctgagctggagctggggctgaggtggactgggctgggctgggctgggctgagctgggctgagctgagctggactgagctgggctgggctgggctaggctgggctgggctgggctgggctgggctgggctgggctaggctgggctgggctggactgggctgggctagattgggctgggctggactgggctaggctgagctgggctgagctgagctggactgagctgggctgggctgggctgggctgggctgggctgggctgggctagattgggctgggctggactgggctaggctgagctgggctgagctgagctggactgagctgggctgggctgggctgagctgggctgggctgggctgggctgggctgggctaggctgggctgggctgggctgggctgggctgggctaggctgggctgggctgggctgagctgggctgagctgagctggactgagctgggctgggctgggctaggctgggctgggctgggctgggctgggctagattgggctgggctggactgggctaggctgagctgggctgagctgagctggactgagctgggctgggctgggctgggctgggctgggctgggctgggctaggctgggctgggctgagctgggctgggctgggctgggctgagctgggctgagctgagctggactgagccgggctgggctgggctaggctgggctgggctgggctgggctgggctgggctgggctgggctaggctgggctgggctgggctagattgggctgggctggactgggctaggctgagctgggctgagctgagctggactgagctgggctgggctgggctgggctggcctgggctggcctgggctgggctggcctgggctgggctgagctggactgggctagactgggctagactgggctgggctggactgtgctgggctggactgtgctgggctggactgggctgggctgggctgggctgggctgagctgggctgggctagattgggctgggctggactgggctgggctgggctgagctcggctgggccgggctgagctgggctgagctagactgggctgagctggactgggctgggctgggctgagctcggctgggccgggctgagctgggctgagctagactgggctgagctgggctgagctgggctgagctgggctgtgctgagctgggctgagctgagctgggctgagctggactaggctggggtgagctaggctgggctaggctgggctgggctgagctgggctgggctgagctgggctaaactggactgggctaggctgagctgagctgagctgagctgagctggactgggccgggctgggctgagctgagctgggctaggctgggctgggctgggctgacctgatctgagctggactgggctgaactgggtgagcttaggtggactgagctggtctgggctgagctgagctgggctgagctgggctgggctgagctgagctgggctgagctgggctgggctgagctggactgagctatgctgagctgagctgggttgcgttgacctgggctgagctgggctgggctgggttggactgggctgggctgagctgagctgagctgggctgggctgagctgagctgggctgggttggactgggctgggctgggttggactgggctgggctgagctgagctgtactgagctggactgacctgggctaagctgagctgggctgacctgtactgggctgggctagactgggctgagctggactgagctgagctagactgggctgagctgggtgagcttaggtggactgagctgggctgggctgggctgagctgagctgagctgggctgggctgggctgggatgagctgtactgagctgccctggggtgggctgggctgagctgggctgagctgggctgggctggactgagctggactgagctggactggcctgggctgggctgggctggatgagctgaggtggctgctaatgtgggaaggaggccgtgggttgagtgtgactccacctgcagagccctgagcccagctgtgttcttaggggttctgagggccacgcagctctgttgcaccatgattctgtcttctctcttgcccactgcctgaaggaaatttggagtgggctgggcccagagctcccctgggtaacaggccctgtcctggagggcctggcagggacatggcttagcctgttggcctctagtcccgagacctcataggccacaggggtccactgtggcttgtttgggcctggggtggggctcatggagtggtgggtgttggactgagactctgaccagggacagggggatggggtcacagccaagccactccacccctaccccatgcacacagcactcagagcccaggccccctcctcagagcccccaccaaaatcctctctaggggcaggggaaagagcaagacatgtcccccacccagagcaggaactggggtcagggagctcaggggactcagccactccatggcagagccctgtttaatataacttgtgtctgggatggcctgggtcagaggccctatctaaggagcatgttcagaaactgtgtcgctgggatgagacagctgggtccaaccgcaggcccatggtgcaggagctgtgtaaccttggggctgtcaccaggcctctctgtgctgggttcctccagtgtagaggagaggcaggtacagcctgtcctcctggggacatggcatgagggccgcgtcctcacagcgcattctgtgttccagcatccccgaccagccccaaggtcttcccgctgagcctcgacagcaccccccaagatgggaacgtggtcgtcgcatgcctggtccagggcttcttcccccaggagccactcagtgtgacctggagcgaaagcggacagaacgtgaccgccagaaacttcccacctagccaggatgcctccggggacctgtacaccacgagcagccagctgaccctgccggccacacagtgcccagacggcaagtccgtgacatgccacgtgaagcactacacgaattccagccaggatgtgactgtgccctgccgaggtcagagggcaggctggggagtggggcggggccaccccgtcctgccctgacactgcgcctgcacccgtgttccccacagggagccgccccttcactcacaccagagtggaccgcgggccgagccccaggaggtggtggtggacaggccaggaggggcgaggcgggggcacggggaagggcgttctgaccagctcaggccatctctccactccagttcccccacctcccccatgctgccacccccgactgtcgctgcaccgaccggccctcgaggacctgctcttaggttcagaagcgaacctcacgtgcacactgaccggcctgagagatgcctctggtgccaccttcacctggacgccctcaagtgggaagagcgctgttcaaggaccacctgagcgtgacctctgtggctgctacagcgtgtccagtgtcctgcctggctgtgcccagccatggaaccatggggagaccttcacctgcactgctgcccaccccgagttgaagaccccactaaccgccaacatcacaaaatccggtgggtccagaccctgctcggggccctgctcagtgctctggtttgcaaagcatattcccggcctgcctcctccctcccaatcctgggctccagtgctcatgccaagtacagagggaaactgaggcaggctgaggggccaggacacagcccagggtgcccaccagagcagaggggctctctcatcccctgcccagccccctgacctggctctctaccctccaggaaacacattccggcccgaggtccacctgctgccgccgccgtcggaggagctggccctgaacgagctggtgacgctgacgtgcctggcacgtggcttcagccccaaggatgtgctggttcgctggctgcaggggtcacaggagctgccccgcgagaagtacctgacttgggcatcccggcaggagcccagccagggcaccaccacctacgctgtaaccagcatactgcgcgtggcagctgaggactggaagaagggggagaccttctcctgcatggtgggccacgaggccctgccgctggccttcacacagaagaccatcgaccgcatggcgggtaaacccacccacatcaatgtgtctgttgtcatggcggaggcggatggcacctgctactgagccgcccgcctgtccccacccctgaataaactccatgctcccccaagcagccccacgcttccatccggcgcctgtctgtccatcctcagggtctcagcacttgggaaagggccagggcatggacagggaagaataccccctgccctgagcctcggggggcccctggcacccccatgagactttccaccctggtgtgagtgtgagttgtgagtgtgagagtgtgtggtgcaggaggcctcgctggtgtgagatcttaggtctgccaaggcaggcacagcccaggatgggttctgagagacgcacatgccccggacagttctgagtgagcagtggcatggccgtttgtccctgagagagccgcctctggctgtagctgggagggaatagggagggtaaaaggagcaggctagccaagaaaggcgcaggtagtggcaggagtggcgagggagtgaggggctggactccagggccccactgggaggacaagctccaggagggcc

SEQ ID NO: 11 - DNA, 1971 bp, Homo sapiens
atattggagcagcaagaggctgggaagccatcacttaccttgcactgagaaagaagacaaaggccagtatgcacagctttcctccactgctgctgctgctgttctggggtgtggtgtctcacagcttcccagcgactctagaaacacaagagcaagatgtggacttagtccagaaatacctggaaaaatactacaacctgaagaatgatgggaggcaagttgaaaagcggagaaatagtggcccagtggttgaaaaattgaagcaaatgcaggaattctttgggctgaaagtgactgggaaaccagatgctgaaaccctgaaggtgatgaagcagcccagatgtggagtgcctgatgtggctcagtttgtcctcactgaggggaaccctcgctgggagcaaacacatctgacctacaggattgaaaattacacgccagatttgccaagagcagatgtggaccatgccattgagaaagccttccaactctggagtaatgtcacacctctgacattcaccaaggtctctgagggtcaagcagacatcatgatatcttttgtcaggggagatcatcgggacaactctccttttgatggacctggaggaaatcttgctcatgcttttcaaccaggcccaggtattggaggggatgctcattttgatgaagatgaaaggtggaccaacaatttcagagagtacaacttacatcgtgttgcagctcatgaactcggccattctcttggactctcccattctactgatatcggggctttgatgtaccctagctacaccttcagtggtgatgttcagctagctcaggatgacattgatggcatccaagccatatatggacgttcccaaaatcctgtccagcccatcggcccacaaaccccaaaagcgtgtgacagtaagctaacctttgatgctataactacgattcggggagaagtgatgttctttaaagacagattctacatgcgcacaaatcccttctacccggaagttgagctcaatttcatttctgttttctggccacaactgccaaatgggcttgaagctgcttacgaatttgccgacagagatgaagtccggtttttcaaagggaataagtactgggctgttcagggacagaatgtgctacacggataccccaaggacatctacagctcctttggcttccctagaactgtgaagcatatcgatgctgctctttctgaggaaaacactggaaaaacctacttctttgttgctaacaaatactggaggtatgatgaatataaacgatctatggatccaggttatcccaaaatgatagcacatgactttcctggaattggccacaaagttgatgcagttttcatgaaagatggatttttctatttctttcatggaacaagacaatacaaatttgatcctaaaacgaagagaattttgactctccagaaagctaatagctggttcaactgcaggaaaaattgaacattactaatttgaatggaaaacacatggtgtgagtccaaagaaggtgttttcctgaagaactgtctattttctcagtcatttttaacctctagagtcactgatacacagaatataatcttatttatacctcagtttgcatatttttttactatttagaatgtagccctttttgtactgatataatttagttccacaaatggtgggtacaaaaagtcaagtttgtggcttatggattcatataggccagagttgcaaagatcttttccagagtatgcaactctgacgttgatcccagagagcagcttcagtgacaaacatatcctttcaagacagaaagagacaggagacatgagtctttgccggaggaaaagcagctcaagaacacatgtgcagtcactggtgtcaccctggataggcaagggataactcttctaacacaaaataagtgttttatgtttggaataaagtcaaccttgtttctactgtttta

SEQ ID NO: 12 - DNA, 2543 bp, Homo sapiens
gctggtctatctaagctgatagcacagttctgtccagagaaggaaggcagaataaacttattcattcccaggaactcttggggtaggtgtgtgtttttcacatcttaaaggctcacagaccctgcgctggacaaatgttccattcctgaaggacctctccagaatccggattgctgaatcttccctgttgcctagaagggctccaaaccacctcttgacaatgggaaactgggtggttaaccactggttttcagttttgtttctggttgtttggttagggctgaatgttttcctgtttgtggatgccttcctgaaatatgagaaggccgacaaatactactacacaagaaaaatccttgggtcaacattggcctgtgcccgagcgtctgctctctgcttgaattttaacagcacgctgatcctgcttcctgtgtgtcgcaatctgctgtccttcctgaggggcacctgctcattttgcagccgcacactgagaaagcaattggatcacaacctcaccttccacaagctggtggcctatatgatctgcctacatacagctattcacatcattgcacacctgtttaactttgactgctatagcagaagccgacaggccacagatggctcccttgcctccattctctccagcctatctcatgatgagaaaaaggggggttcttggctaaatcccatccagtcccgaaacacgacagtggagtatgtgacattcaccagcattgctggtctcactggagtgatcatgacaatagccttgattctcatggtaacttcagctactgagttcatccggaggagttattttgaagtcttctggtatactcaccacctttttatcttctatatccttggcttagggattcacggcattggtggaattgtccggggtcaaacagaggagagcatgaatgagagtcatcctcgcaagtgtgcagagtcttttgagatgtgggatgatcgtgactcccactgtaggcgccctaagtttgaagggcatccccctgagtcttggaagtggatccttgcaccggtcattctttatatctgtgaaaggatcctccggttttaccgctcccagcagaaggttgtgattaccaaggttgttatgcacccatccaaagttttggaattgcagatgaacaagcgtggcttcagcatggaagtggggcagtatatctttgttaattgcccctcaatctctctcctggaatggcatccttttactttgacctctgctccagaggaagatttcttctccattcatatccgagcagcaggggactggacagaaaatctcataagggctttcgaacaacaatattcaccaattcccaggattgaagtggatggtccctttggcacagccagtgaggatgttttccagtatgaagtggctgtgctggttggagcaggaattggggtcaccccctttgcttctatcttgaaatccatctggtacaaattccagtgtgcagaccacaacctcaaaacaaaaaagatctatttctactggatctgcagggagacaggtgccttttcctggttcaacaacctgttgacttccctggaacaggagatggaggaattaggcaaagtgggttttctaaactaccgtctcttcctcaccggatgggacagcaatattgttggtcatgcagcattaaactttgacaaggccactgacatcgtgacaggtctgaaacagaaaacctcctttgggagaccaatgtgggacaatgagttttctacaatagctacctcccaccccaagtctgtagtgggagttttcttatgtggccctcggactttggcaaagagcctgcgcaaatgctgtcaccgatattccagtctggatcctagaaaggttcaattctacttcaacaaagaaaatttttgagttataggaataaggacggtaatctgcattttgtctctttgtatcttcagtaatttacttggtctcgtcaggtttgagcagtcactttaggataagaatgtgcctctcaagccttgactccctggtattctttttttgattgcattcaacttcgttacttgagcttcagcaacttaagaacttctgaagttcttaaagttctgaagttcttaaagcccatggatcctttctcagaaaaataactgtaaatctttctggacagccatgactgtagcaaggcttgatagcagaggtttggtggttcagagttatacaactaatcccaggtgattttatcaattccagtgttaccatctcctgagttttggtttgtaatcttttgtccctcccacccccacagaagatttctaagtagggtgactttttaaataaaaatttattgaataattaatgataaaacataataataaacataaataataaacaaaattaccgagaaccccatccccatataacaccaacagtgtacatgtttactgtcacttttgatatggtcttatccagtgtgaacagcaatttattcttatttttgctcatcaaaaaataaaggattttcttcttcacttga

SEQ ID NO: 13 - DNA, 2259 bp, Homo sapiens
cgataaagcccccgccgccgcggcagccagcttgcgctgtggggctgcccgggctgcgcggcgtctgcaggcgccaccgctgcctctttccggctgtgaccctcctcgccgccgccgcttggctgcgtcctccgactccccgcgccgccgagaccaggctcccgctccggttgcggccgcaccgccctccgcggccgccccctggggatccagcgagcgcggtcgtccttggtggaaggaaccatgaactggcatctccccctcttcctcttggcctctgtgacgctgccttccatctgctcccacttcaatcctctgtctctcgaggaactaggctccaacacggggatccaggttttcaatcagattgtgaagtcgaggcctcatgacaacatcgtgatctctccccatgggattgcgtcggtcctggggatgcttcagctgggggcggacggcaggaccaagaagcagctcgccatggtgatgagatacggcgtaaatggagttggtaaaatattaaagaagatcaacaaggccatcgtctccaagaagaataaagacattgtgacagtggctaacgccgtgtttgttaagaatgcctctgaaattgaagtgccttttgttacaaggaacaaagatgtgttccagtgtgaggtccggaatgtgaactttgaggatccagcctctgcctgtgattccatcaatgcatgggttaaaaatgaaaccagggatatgattgacaatctgctgtccccagatcttattgatggtgtgctcaccagactggtcctcgtcaacgcagtgtatttcaagggtctgtggaaatcacggttccaacccgagaacacaaagaaacgcactttcgtggcagccgacgggaaatcctatcaagtgccaatgctggcccagctctccgtgttccggtgtgggtcgacaagtgcccccaatgatttatggtacaacttcattgaactgccctaccacggggaaagcatcagcatgctgattgcactgccgactgagagctccactccgctgtctgccatcatcccacacatcagcaccaagaccatagacagctggatgagcatcatggtgcccaagagggtgcaggtgatcctgcccaagttcacagctgtagcacaaacagatttgaaggagccgctgaaagttcttggcattactgacatgtttgattcatcaaaggcaaattttgcaaaaataacaacagggtcagaaaacctccatgtttctcatatcttgcaaaaagcaaaaattgaagtcagtgaagatggaaccaaagcttcagcagcaacaactgcaattctcattgcaagatcatcgcctccctggtttatagtagacagaccttttctgtttttcatccgacataatcctacaggtgctgtgttattcatggggcagataaacaaaccctgaagagtatacaaaagaaaccatgcaaagcaacgactactttgctacgaagaaagactcctttcctgcatctttcatagttctgttaaatatttttgtacatcgcttctttttcaaaactagttcttaggaacagactcgatgcaagtgtttctgttctgggaggtattggagggaaaaaacaagcaggatggctggaacactgtactgaggaatgaatagaaaggcttccagatgtctaaaagattctttaaactactgaactgttacctaggttaacaaccctgttgagtatttgctgtttgtccagttcaggaatttttgttttgttttgtctatatgtgcggcttttcagaagaaatttaatcagtgtgacagaaaaaaaaatgttttatggtagcttttactttttatgaaaaaaaaattatttgccttttaaattcttttcccccatccccctccaaagtcttgatagcaagcgttattttgggggtagaaacggtgaaatctctagcctctttgtgtttttgttgttgttgttgttgttgttttatataatgcatgtattcactaaaataaaatttaaaaaactcctgtcttgctagacaaggttgctgttgtgcagtgtgcctgtcactactggtctgtactccttggatttgcatttttgtattttgtacaaagtaaaaataaactgttatgagtagtaaaaataaagctatttctctgctatttgaaaatacaatagaagaaactgagccttttagacattcgtcagcctcttctaataaacctttgtactatgtaaacatcaggaaattc

SEQ ID NO: 14 - DNA, 3520 bp, Homo sapiens
aattcccagcaggccttgggcctcagtgcggccgcgaagcagagcgggctgtagagccttgcgcgcgcagtggggatggaacgttgctaggcttagcgggtctggctgctgggggcccgagcagcacgctcggagccgccgcgcgccaaagcgggaatctgggaggcgagcagctctgcagttaatgcacgtattttaaactcccgggcctgcggacgctatgcacaggaagcacctccaggagattccagacctgagtagcaacgttgccaccagcttcacgtggggatgggattccagcaagacttctgaactgctgtcaggcatgggggtctccgccctggagaaagaggagcccgacagtgagaacatcccccaggaactgctctcaaacctgggccacccggagagccccccacggaaacggctgaagagcaaagggagtgacaaagactttgtgattgtccgcaggcctaagctaaatcgagagaactttccaggtgtttcatgggactcccttccggatgagctgctcttgggaatcttttcctgtctgtgcctccctgagctgctaaaggtctctggtgtttgtaagaggtggtatcgcctagcgtctgatgagtctctatggcagaccttagacctcacaggtaaaaatctgcacccggatgtgactggtcggttgctgtctcaaggggtgattgccttccgctgcccacgatcatttatggaccaaccattggctgaacatttcagcccttttcgtgtacagcacatggacctatcgaactcagttatagaagtgtccaccctccacggcatactgtctcagtgttccaagttgcagaatctaagcctggaaggcctgcggctttcggatcccattgtcaatactctcgcaaaaaactcaaatttagtgcgacttaacctttctgggtgttctggattctctgaatttgccctgcagactttgctaagcagctgttccagactggatgagctgaacctctcctggtgttttgatttcactgaaaagcatgtacaggtggctgttgcgcatgtgtcagagaccatcacccagctgaatcttagcggctacagaaagaatctccagaaatcagatctctctactttagttagaagatgccccaatcttgtccatctagacttaagtgatagtgtcatgctaaagaatgactgctttcaggaatttttccagctcaactacctccaacacctatcactcagtcggtgctatgatataatacctgaaactttacttgaacttggagaaattcccacactaaaaacactacaagtttttggaatcgtgccagatggtacccttcaactgttaaaggaagcccttcctcatctacagattaattgctcccatttcaccaccattgccaggccaactattggcaacaaaaagaaccaggagatatggggcatcaaatgccgactgacactgcaaaagcccagttgtctatgaagtatttattgcaggatggtgtctcttctttagaacagggaaaataggcaggaagcccaattgctggagtacttagctagttttattcttggttttccctttgccttcattctgcaagtatactagggagccatttgagagggaaaactatgaaatcttgctttttgaaatgattctaaaagcttctatcactgctttgctcttaagagccaaagttgtaggccttttgaaattttaggagagtgagcctataatttcaagataccttaaagagcaaaatttgagccacctcttccaagtgcccttcttactaagtctattcagaatcaagcttaaaaattaccaccagcaaacaatcttcatagcccatataacttttatctatttaattttatagtattgctttataagacagcttagaagaacaataagctatttgtattatgagctgaacaaaaagagaatcataggatagtagcgtctgaggccatcttttctaggaataggaaagagaaaaatgtatttgaattttgcctttagatttgaaattaggttaatagaaataagtaaccccatgtaattcaccttaaaacttaacaaaagaccaaacattacaaaacccagagatatagaatcaatataggatttgaaggcccagcagacagttttctatgacaggttaatctgaagtatcctgtaatgttcattaagttactgtgtttccagaatctaaattagatgagaaatataattgtggttttctaacttgataatcaaattatgttaacatgggtcctttagcttttaaaatgacttgctttgttttagaaaggtggtattaatccactctctattcttgaaaatttggatgggagaattctgaagttgcctgctgttttcctttagcgctgaggttcttaaggttacttttatattactctggaatcaagtattttaaattgtattttttttttaaatgatctctcagcaataattgtttgaaactatccatatataaggttatcagacctacagttccctaagaggaactgcatgttctcttcaatcagaaatatacagtagaagcaggtatatcttccatgcagtttcagtagtaagcactacttatacctacataagagttaaaatccagatgtgggaccttttgataccatcagtgatatatatttttttaaactggtacagagaagtgaaaagattaaattctacttctattttttttttttttttttgagacggagtctcgctctgtcaccaaggccggagtgcagtggtgcgatctcggctcactgcaagctccgcctcccaggttcacgtcattctcctgcctcagcctcccgactagctgggactacaggcgcccaccaccacgcccggctaatttttttgtatttttagtagagacggggtttcaccatgttagccaggatggtctcaatctcctgacctcatgatccgcccgtcttggcctcccaaagtgctgggattacaggcatgagcaactgcgcccagccaaattctacttcttaaaaatcacaaaaactagtttaaattgatgacttgttcgtatgttcaaaatgtaacaacaaaaaaagctaacaccagtcatttatattaactttttttttttaaatcaaaaattgttaatgttagaaacatactatgaagtgcctttatctgcttagacctaaggaagattttaaagttgggttgcacaggaaatgatgatgcttcaatttcttaatagttaaaaagtgctaaatactacttgaaattattgtttacagattagtgacaagagctggggttaggatccggttggactctgacatcggatgccctcaaacatacagaacttccaaactcaagtccagccataagctattttgccaacatgtcagagtaatctgtatttttgtatgtgatttctacttttatagacttgttttaaaacaataaaacacatttttataaaaatgagtgcttaaaaaaaaaaaaaaaaaa

SEQ ID NO: 15 - DNA, 14167 bp, Homo sapiens
actcgtggctgtggtggcttcggcagcggcttcagcagatcggcggcatcagcggtagcaccagcactagcagcatgttgagccgggcagtgtgcggcaccagcaggcagctggctccggttttggggtatctgggctccaggcagaagcacagcctccccgacctgccctacgactacggcgccctggaacctcacatcaacgcgcagatcatgcagctgcaccacagcaagcaccacgcggcctacgtgaacaacctgaacgtcaccgaggagaagtaccaggaggcgttggccaagggagatgttacagcccagatagctcttcagcctgcactgaagttcaatggtggtggtcatatcaatcatagcattttctggacaaacctcagccctaacggtggtggagaacccaaaggggagttgctggaagccatcaaacgtgactttggttcctttgacaagtttaaggagaagctgacggctgcatctgttggtgtccaaggctcaggttggggttggcttggtttcaataaggaacggggacacttacaaattgctgcttgtccaaatcaggatccactgcaaggaacaacaggccttattccactgctggggattgatgtgtgggagcacgcttactaccttcagtataaaaatgtcaggcctgattatctaaaagctatttggaatgtaatcaactgggagaatgtaactgaaagatacatggcttgcaaaaagtaaaccacgatcgttatgctgagtatgttaagctctttatgactgtttttgtagtggtatagagtactgcagaatacagtaagctgctctattgtagcatttcttgatgttgcttagtcacttatttcataaacaacttaatgttctgaataatttcttactaaacattttgttattgggcaagtgattgaaaatagtaaatgctttgtgtgattgaatctgattggacattttcttcagagagctaaattacaattgtcatttataaaaccatcaaaaatattccatccatatactttggggacttgtagggatgcctttctagtcctattctattgcagttatagaaaatctagtcttttgccccagttacttaaaaataaaatattaacactttcccaagggaaacactcggctttctatagaaaattgcactttttgtcgagtaatcctctgcagtgatacttctggtagatgtcacccagtggtttttgttaggtcaaatgttcctgtatagtttttgcaaatagagctgtatactgtttaaatgtagcaggtgaactgaactggggtttgctcacctgcacagtaaaggcaaacttcaacagcaaaactgcaaaaaggtggtttttgcagtaggagaaaggaggatgtttatttgcagggcgccaagcaaggagaattgggcagctcatgcttgagacccaatctccatgatgacctacaagctagagtatttaaaggcagtggtaaatttcaggaaagcagaagttaaaggcaaaattgtaaatcagtcgagatcgggtgccttcagggtggtatggctgtataccaaaattgtaaatcactacatgaagcttatatattggtttggcctgaaaggtgaagtggggtaggcagggggcgggcttacaggttatggtggattcaaagactccctgatttgtgattggttaaggaagcaaagctttgtctaaaaacttggggtccgcagaaaggaacattaaggtctggccaggcccctcaggaagaaactgagagcaaagaatggaggtcagagtttagtccctggtgttcccccttatctgacgtctgtgtgaatccatttggtgggggtctgggtttctgaaaagtagctcaggggcacgtgttaaggatgtctctaggtgactctaacttccctggctattgtttgaaactgttatgaccttcttgcttatcagcttgctggtttccttctcggggcgagctgggtgcctggagttttcggtgaaggaaactcaagattctcctttatttctgtgcttgtgggaatccccctggcacaccccaaagaggggtccctgctccgtctcacagggatctttttgtatatttggcttagcatcatacatttgccatgttgtttcatcatctgcctaatttactgtttttgaatatttcatttgtttctaattgttactacagataatgctggggtgagcaactctgtgtacataggtttatctcctattggaatattttctttatataggcgttttttttttttctttttttttggagacagagtcttgctctgttgcccaggctggagtgcagtggcgcgaccggagctcactgcaacctccacttcccgggttcaagtgattgtcccacctcagcctcctgaatagctgggattacaggtgcatgctaccatgcctggctactttttgtatttttagcagagacagggtttcaccatgttggccagggtggtctcgaactcctgacctcaagtgatccgtctggctcagcctcccaaagtgctgggattacaggtgtgagccactgcacctggcctatataggcttttttcttaaacctatttagtaatgttttcccaagtttattttttatttttaattttttccccaagtttatttttctatttttttttcatggaaaaatggggtaacttagcagtttcaatattgaagactgaagtttaaaaaaaatttaaattcaaggtacttttaaaattcagttagaaaagtaggctttaaaaattattagagacaagagtaccaaagcggtgtgtgtatgtgtgtgtgtgtatgcatgcttgtggattggaaaaactttggagactgattacttttcattatatatgtgtcacagtgaaacagcttttatgtgtcatgtaagattactgcttgcctctctaaggaaggtcgtgactgtttaaatagacgggcaaggtggaaccttttgaaagatgagcttttgaatataagttgtctgctagatcatggtttgtattgaactaacaaggtttgcagatctgctgacttatataaagctttttgattcctactaagctttaagatttaaaaaatgttcaatgttgaaatttctgtggggctctatttttgctttggctttctggtgagagagtgaggaagcattctttccttcactaagtttgtctttcttgtcttctggatagattgattttaagagactaagggaatttacaaactaaagattttagtcatctggtggaaaaggagactttaagattgtttagggctgggcggggtgactcacatctgtaatcccagcactttgggaggccaaggcaggcagaacacttgaaggagttcaagaccagcgtggccaacgtggtgaaaccctgtctctactaaaaatacaaaaattgtttagctctgtttttcataatagaaatagaaaaggtaaaattgcttttcttctgaaaagaacaagtattgttcatccaagaagggtttttgtgactgaatcagcagtgcctgccctagtcatagctgtgcttcaaaaacctcagcatgattagtgttggagcaaaacaaggaagcaaagcaaatactgtttttgaaattctatctgttgcttgaactattttgtaataattaaactttgatgttgagaaatcacaactttattgtacacttcattgcaacttgaaattcatggtcttaaagtgagatttgaatttctattgagcgcctttaaaaaagtaataccaaaccataaagttaaaatctatgtatattgagtcatatctaaaaccacgtataaacataaattgtatttcctgttttaattccaggggaagtactgtttgggaaagctattattaggtaaatgttttacaaattactgtttctcactttcagtcataccctaatgatcccagcaagataatgtcctgtcttctaagatgtgcatcaagcctggtacatactgaaaaccctataaggtcctggataatttttgtttgattattcattgaagaaacatttattttccaattgtgtgaagtttttgactgttaataaaagaatctgtcaaccatcaaagaggtctgcattatgcttgcatgtcaaaaactttaaaaatcctataatcttctgtcattttcactgagtttccatgggaaaggaatagtaaataatgggtagttgaaatattactcttaagaccaagacctgtatctccagtcatatctgtaataacatcatctgataacctaaaagcatagtattagggatatacgacaaaaccaaagtgtttttgctgttgtcacataccactcaatacttttacaccaggttgtccagtggacaccagctggatgtcctataattcaattctgacactgtctacctggaattggagtcagatcccacaggtggagggctcagcccacaagactgcccccactccagataccaatcgcaagtccctatacttctgactggctataaagtggggttcccgtgaccctttccttggttttgatttatttgctagagcagctcccagaacacagagaaacactctacttatgtttacccatttttaattttattactttattaaaactacatattggttacaatactaatttattgtaaaggatatttcatttatttatttttttatttagagatggagtctcactgtgtcacccaggctggagtgcggtggcacagtctcaactcactgcaacctccacctcctgagttcaagcgattctcatgcctcagcctcccaagtagctgggattacaagtgtgcaccaccatgcccagctaatttttgtatttttagtagagatggggtttcactctgttggccaggctggtctcaaactcctgacctcaagtcatccacccacctcagcctcccaaagtgctgagattacaggtgtgagccattgcctctggcttgtaaaggatatttcaaagaatacagatgaacagccagatggaagagatgcacagggcaaggcatgtgggaaggggtatggagctttcatgctctctccacgtcatcagctacccagaagctcatctggaccccgaccctttggggttttacggaggcttcattatgtcagcattaccattggcaattggcgattaactcaaccttcagcctctctcccctttctggaggttgggggttgaggctgggagtccaaaccctccaatcttgccttggtctttctggtaagcagccccccgtcctgaagctacctagaggctcccagccaccaatcatttcattggcaaaccaaagatacttcaaggggtttaggagccaagagaccaagcaaggattgagacaatatatatatttcttataaataacatgatcacaaatagtattttatatatttctcataatagctggttgtggttactcacacctatcatcccagctactaagaagctaaggcaggaggatcacaggcccaggagtttgcagctgtagtgagctatgattgtgctactgcactccagcctgggtgacagtgtgagaccctgtctcttaaagttcttgtaacatcttagaacattaaccaaccacagattattgccttaactctgaaaaataaagtaatcatacttttacaagatgtattttacataaagttctggtgatattttactctggtcattggaatataggagcttaccacctggtaccactcttcctaaagtggtatactatttggtatagtactggcatactatttggaaagggatgtgaagttggcatgacctgtctagggtgaagtcatgctgtctgctattcattgtgggctttacagtaatgagagtgcttctgttgtcaagatgcttctgggacacgttaaaaaaaatttaagatttctcagtttgtgaaaaggaaggagcacgaatgctttcaagttcctatgacatgctagtcatctttcagtgtgtcccattgttgcacccagtagtctcgatgcccagcgtcacggtgattccaagtttgcctctctgcccactataatttgtgctccatgaagtcccaggacatgaggttcttgttcatttgtgcgtctgggcccatatccaaatattaaacaatgtgacttaatgtatttatcatattgtaaatatgggtatccccaaggctcagaagttaacacagcatatccacagagaggtttgacagcatggctgtggtgactgggaaggccttatgcttgctcctccttctgctgcttgcctttgtgtgggcatggaaagaacattgaattaggtactggaagacctgggtcctggtcttggagattttaccagagcacctgtgggatattggtcaagatgcctggttttagtcctgctcctttgctgtgaaagaggatcttaaggtgccaactctggcattttattttttacttatttatttttaaattatactttaagttctagggtacatgtgtacaacatgcaggtttgttacatgtatacatgtgccatgttggtgtgctgcacctattaactcgtcatttacattaggtatatctcctaatgctatccctcccccttctccccacccctcgacaggccccggtgtgtgatgttccccttcctgtgtccaagtgttctcattgttcaattcccatctatgagtgagaacatgcggtgtttgtttttttgtccttggaatagtttgctgagaaggatggtttccagcttcatccatgtccctataaaggacatgaactcttccttttttatggctgcatagtattccatggtgtatatgtgccacatcttcttaaaccaatctatcattgatggacatttgggttggttccaagtctttgctattgtgaacagtgccacaataaatatacgtgtgcatgtgtctttatagcagcatgatttataatcctttgggtatatacccagtaatgggatggctgggtcaaatggtatttctagttctagatccctgaggaatcgccacactgtcttccacaatggttgaactagtttacagtcccaccaccagtgtaaaagtgttcctatttctccacatcctctccagcacctgttgtttcctgactttttaatgattgacattctaactggtgtgagatggtatctcattgtggttttgatttgcatttctctgatggcccatgatgatgagcatttttttcatgtgtctgttggatgcatggatgtcttcttttgagaagtgtctcttcatatccttcacctactttttgatggggtttgtttttttcttgtaagtttgtttgagttccttgtagattctggatattagccctttgtcagatgagtagattgcaaaaattttctcccattttgtaggttgcctgttcactctgatggtagtttcttttgctgtgcagaagctcttgagtttaatgagatcccatttgtcaattttggcttctgttgccattgcttttggtgttttagacatgaagtccttgcccatgcctgtgtcctgaatggtactgcataggttttcttctagggtttttatggttttaggtctaacatttaagtctttaatccatcttgaattaatttttgtataaggtgtaaggaagggatccagtttcagctttctacatgtggctagccagttttcccagcaccatttattaaatagggaatcctttccccatttcttgtttttgtcaggtttctcaaagatcagatagttgtagatgtgtggtattatttctgagggctctgttctgttccattggtctatatctctgttttggtactagtaccatgctgttttggttactgcagccttgtagtatagtttgaaatcaggtagcgtgatgcctccagctttgttcttttggcttaggatcgttttggcagtgcaggctcttttttggttccacatgaactttaaagtagttttttccaattctatgaagaaagtcatgggtagcttgatggggatggcattgaatctataaattaccttgggcagtatagccattttcacgatattgattcttcctatccatgagcatggaatgttcttccatttgtttgtgtcctcttttatttccttgagcagtggtttgtagttctccttgaagaggtccttcacatcccttgtaagttggattcctaggtattttattctctttgaggcagttgtgaatgggagttcactcatgatttggctctctgtttgtctgttgttggtgtataagaatgcttgtgatttttgcacattgattttgtatcctgagattttgctgaagttgcttatcaaattaaggagattttgggctgagatgatggggttttctaaatataaaatcatgtcatctgcaaacagggacaatttgacttcctcttttccttattgaataccctttatttctttctcctgcctgatggccctggccagaacttccaacactatgttgaataggagtggtgagagagggcatccctgtcttgtgccagttttcaaagggaatgcttccagtttttgcccattcagtctgatattggctgtgggtttgtcatagatagctcttattattttgagatatgtcccatcaatacctaattcattgagagtttttagcatgaagggctgttgaattttgtccaaggccttttctgcatctgttgagataatcatgtggtttttgtctttggttctgtttatatgctggattacttttattgatttgtgtatgttgaaccagccttgcatcccagggatgaagcccacttgatcatggtggataagctttttgatatgctgctggattcagtttgccagtattttattgaggatttttgcattgattttcatcagggatattggtctaaagttctctttttttgttatgtctctgccaggctttggtatcaggatgatgctggcttcataaaatgagttagggaggattccctctttttctattgattggaatagtttcagaaggaatggtaccagctcttccttgtacctctggtagaattcggctgtgaatccatcttgtcctggactttttttggttggtaggctattaattattgcctcaatttcagagcctgttattggtctattcagggattaaacttcttcctggtttagttttgagagggtgtatgtgtccaggaatttatctatttcttctagattttctagtttatttgcatagaggtgtttatagtattctctgtgtactctgtatttctgtgggattggtggtgatatccactttatcattttttattgcatttatttgattcttctctcttttcttgtttattagtcttgctagcggtctatcaattgtgtttatcttttcaaaaaaccagctcctggattcattcattttttgaaggtttttttgtgtctctgtctccttcagttctgctctgatcttagttatttcttgtcttctgctagctgttgaatgtgtttgctcttgcttctctaatatttttaattgtgatgttagagtgtcaattttagatctttcctgctttctcttgtgggcacttagtgctgtaaatttccctctacacactgctttaaatgtgtcccagagattctggtatgttgtgtctttgttctcgttggtttcaaagaacatctttatttctgccttcattttgttatgtacccagtagtcattcaggagcaggttgttcagtttccatgtagctgagtggttttgagtgagtttcttaatcctgagttctagtttgattgcactgtggtctgagacagtatgttataatttctgttcttttacatttgctgaggagtgctttacttccaactatgtggtcaattttggaataggtgcgatgtggtgctgagaagaatgtatattctgttgatttggggtggagagttctgtagatgtctattaggtctgcttggtgcagagctgaattcaattcctggatatccttgttaactttctgtctcgttgatctgtctaatattgacagtggggtgttagagtctcccattgttattgtgtgggagtctaaatctctttgtaggtctctaaggacttggtttatgaatctgggtgctcctgtattgggtgcatatatatttaagatagttagctcttcttgttgaattgatccctttactatcatgtaatggccttctttgtctcttttgatctttgttggtttaaagtctgttttatcagagactaggattgcaaccccggcctttttttttgttttccgtttgcttggtagatcttcctccatccttttattttgagcctatgtgtgtgtgtctctgtacgtgagatgggtttcctgaatacagcaccctgatgggtcttgactctttatccagtgtgccagtctgtgtcttttaattggagcatttagcccatttacatttaaggttaatattgttatgtgtgaatttgatcctgtcactaggatgttcactggttattttgctcgttagttgatgcagtttcttcctagcctcaatggtctttacaatttggcatgtttttgcagtggctgatactggttgttccattccatgtttagtgcttccttcaggagctcttgtaaggcaggcctggtggtgacaaaatctctcagcatttgcttgtttgtaaaggattttatttctccttcacttatgaagcttagtttggctggatatgaaattctgggttgaaaattcttttcttcaagaacgttgaatattgacccccactctcttctggcttgtagagtttctgctgagagatcagctgttagtctgatgggcttccctttgtgggtaacccgacctttctctctggctgcccttaacattttttccttcatttcaactttggtgaatctgacaattatgtgtcttggagttgctcttctcgaggagtatctttgtggcgttctctgtatttcctgaatttgaatgttgtcctcccttgctagattggggaagttctcctggataatatcctgcagagtgttttccagcttggttccattctccccgtcactttcaggtacaccaatcagacgtagatttggtcttttcacatagtcccatatttcttggaagctttgttcgtttctttttactcttttttctcttaacttctcttctcacttcatttcattcatctgatcttcaatcactgataacctttcttccagttgatcgaattggctactgaagcttgtgcattcgtcacgtagttctcatgccatggttttcagctccatcaggtcatttaaggacttctctatgctggttattctagttagccatttgtctaatcttttttcaaggtttttaggttctttgtgatgggttcgaacttcctcttttagcttggagaagtttgatcatctgaagccttcttctctcaactcgtcaaagtcattctccgtccagctttgttctgttgctggcaaggagctatgttcctttggagggggagaggcgctctgatttttagaattttcagcttttctgctctgttttttccccatctttgtggttttatctacctttggtctttggtgatggtgatgtgcagatggggttttggtgtggatgtcctttctgtttgttagttttccttctaacagtcaggaccgccagctgcaggtctgttggagtttgctggacgtccacgccagaccctgtttgcctgggtatcacagtggaggctgtagaacagcgaatattgctgaacagcaaatgttgctgcctgatcattcctctggaagcttcatctcagaggggtacccggccatgtggggtgtcagtctgcccctacttgggggtgcctcccagttaggctactcgggggtcagggactcacttgaggaggcagtctctccgttctcagatctcaaactctgtgctgggagaaccactggtctcttcaaagctgtcagacagggacattgaagtctgcagagatttctgctgccttttgttcggctatgccatgcccccagaggtggagtctacagaggcaggcaggcaggcctccttgagctgcagtgggctccacctagttcgagcttcccggctgctttatttacctactgaagcctcagcaatggtgggctcccctcccctagcctcactgccaccttgcagttcgatctcagactgctgtgctagcaatgagcaaggctccatgggcgtgggaccctccgagctaggcacaggatataatctcctggtgtgccgtttgctaagaccattggaaaaacgcagtattagggtgggagtgacccaattttccaggtgccgtctgtcacagcttcccttggctaggaaagggaattccctgaccccttgccttcccgggtgaggccatgccttgccctgcttcagctcatgctcagtgggctgcacccaccgtcctacacccactgtccaacaagccccagtgagatgaacctggtacctcagttggaagtgcagaaatcacctgtcttctgcgtcgctcacgctgggagctgtagactggagctgttcctattcggccatcttggaacccaacccaagtctggcattttttggttttctctgtgtattgactatgattatagaggataaatggatattgatattattaaatcgtcatttacagaaggcacacaacttatatcctttaaacaaagttctccaaccagtagggtatacttgctggtagtgcttacagctgccaccattcttcactggggctcagagtggatgcctggaggaaaaaaacaaatgaatcttttagctcctagttactgttagcatttttaccagaaaacaatttaaaaaatgacacaagtaagtcttcacctatcaaggctgagtgtggtggcctatacttgtaatctctgtgctttgggaggccaacgcaggaggatctcttgagtccaggagtttgagaccagcctgggcaacaaagcaagaccccatctctacagaaagttaaaatttagctgggcatgctggcacatccctatagtcccagctacttgagaggctgagttgggaggatcccttgaggtcatgagttggagtctacagtgagctgtgattacagtgtgagtctacactgcactccagtctgggtgaaagagatcctgtctctcaaaaaacaagtgattctcctgggaagagatttgtttaaaaagtctgcacctctattgatgataactttgaatgtaaatggattaaattctcccacttaaaagatatagattgactgaatggattaaaaaccaccatcatgactcgactgtatgctgcctacaagaaacctcacctgtaaagacaggccaaaagtgaaggtatggagaaagatattgcatacaaatggaagccaaaaaagagcagaaataactatacttacatgagataaaatagactttaagtcaaaaactgtaaaaagaaaagtcattatgtaatgaaacaaggatcaattcatgcaagatataatcatatttttttattaagaaaatttttttgtagagatggggttatgctatgttgcctggctagtctcaaactctgggtctcaaagcagtcctcctgctttggcctcctaaggtgctgggattataggcatgagccactgtgccaggcctgaggatattatcattataaatatatatgtaccccacactggatgacccagatataaagcaaatattattagatttaaagggagaaatagactctaatacaatagtagttgaggacttcactctactctcagcattggacagattttctagacataaaaccaataaatattggatttaaattgcactttacaccaaatggacctgacatttacagaacattctaataggtgcagaacactctaatagctgcagaacacacgttcttttcatcagcacatggaacattcaccagactagttctggaacccacttcctgccttagtgttctttccaccacagtgcatgataattccgacagaacgccttttatttgtaccttattagttgtagggggaaagctttttcatgtacaaaaatgctgtaattttctgatttaataaagtaattccactga
